(19) United States
(12) Patent Application Publication
(10) Pub. No.: US 2025/0152658 A1
(43) Pub. Date: May 15, 2025

(54) CYCLIC PEPTIDE FOR TRAPPING INTERLEUKIN-1 BETA

(71) Applicant: Merck Sharp & Dohme LLC, Rahway, NJ (US)

(72) Inventors: Faben A. Cruz, Burlingame, CA (US); Danqing Feng, Green Brook, NJ (US); Yan Guo, Westfield, NJ (US); Jennifer Hanisak, Stewartsville, NJ (US); Jennifer L. Hickey, Fords, NJ (US); Ahmet Kekec, Hoboken, NJ (US); Bing Li, Towaco, NJ (US); Michael Man-Chu Lo, Bedminster, NJ (US); Dmitri A. Pissarnitski, Scotch Plains, NJ (US); Christopher W. Plummer, Westfield, NJ (US); Stefania Colarusso, Rome (IT); Dipannita Kalyani, Union, NJ (US); Quang T. Truong, Morganville, NJ (US)

(73) Assignee: Merck Sharp & Dohme LLC, Rahway, NJ (US)

(21) Appl. No.: 18/944,230

(22) Filed: Nov. 12, 2024

Related U.S. Application Data
(60) Provisional application No. 63/598,567, filed on Nov. 14, 2023.
(60) Provisional application No. 63/717,339, filed on Nov. 7, 2024.

(51) Int. Cl. A61K 38/08; C07K 7/64

(52) U.S. Cl. CPC A61K 38/08; C07K 7/64

(57) ABSTRACT

Provided are compounds of the Formula (I), or their pharmaceutically acceptable salts, wherein X¹, X², X³, R¹-R⁹, R^{A}, R^{B}, R^{D}, A¹, A², and subscripts t and w are as herein described.

[chemical structure]

The compounds and their pharmaceutically acceptable salts can trap IL-1β and are expected to have utility as therapeutic agents, for example, for treating cardiovascular disease and inflammatory disorders. The disclosure also provides pharmaceutical compositions which comprise the compounds disclosed herein or pharmaceutically acceptable salts thereof. The disclosure also relates to methods for use of the compounds or their pharmaceutically acceptable salts in the therapy and prophylaxis of cardiovascular disease and inflammatory disorders and for preparing pharmaceuticals for this purpose.

### CROSS-REFERENCE TO RELATED APPLICATIONS

[0001] This application claims the benefit of U.S. Provisional Patent Application Nos. 63/598,567 filed Nov. 14, 2023, and 63/717,339 filed Nov. 7, 2024, the entire contents of which are incorporated by reference herein.

### REFERENCE TO SEQUENCE LISTING SUBMITTED ELECTRONICALLY

[0002] The contents of the electronic sequence listing (25836-WO-PCT_SL.xml; Size: 2,104,813 bytes; and Date of Creation: Oct. 31, 2024) are herein incorporated by reference in their entirety.

### FIELD

[0003] The present disclosure relates to certain cyclic peptides that trap interleukin-1β (IL-1β), pharmaceutical compositions comprising such peptides, and methods for using the compounds for treating, inhibiting, or ameliorating one or more cardiovascular disease states that could benefit from trapping IL-1β, including atherosclerosis.

### BACKGROUND

[0004] Atherosclerosis is a disease of the arteries characterized by the accumulation of cholesterol plaques on the interior wall of the artery. Progression of atherosclerosis can result in hardening or narrowing of the arteries and increases the risk of plaque ruptures. These ruptures release cholesterol globules and other material into the bloodstream which may result in blockage of blood flow to the brain, heart, or other organ. Medically, these are known as Major Adverse Cardiac Events (MACE).

[0005] Risk factors for the development and progression of Atherosclerotic Cardiovascular Disease (ASCVD) include high cholesterol, high blood pressure, diet high in saturated fat, smoking, obesity, diabetes, lack of exercise, and elevated levels of C-reactive protein (CRP), a marker of inflammation.

[0006] The first line of treatment to prevent the progression of ASCVD is a healthy diet and exercise, however, compliance is generally poor. Pharmacological treatments for ASCVD have largely focused on cholesterol-lowering medications such as statins, cholesterol absorption inhibitors, and low-density lipoprotein (LDL) receptor inhibitors. These medications are highly effective at reducing the buildup of fatty acid deposits and improving arterial health. Other medications that are prescribed for ASCVD which do not ameliorate the disease state include blood thinners, such as aspirin, to prevent clumping of platelets in narrow arteries, and blood pressure medications to reduce the risk and severity of heart attacks. Surgical options for more aggressive intervention in advanced cases of ASCVD include angioplasty, stent placement, endarterectomy (surgical removal of plaques), and bypass surgery.

[0007] While cholesterol-lowering medications have served as an important standard of care for slowing the progression of atherosclerosis, clinical data support an additional critical role for inflammation in the progression of ASCVD that has remained untreated. Biomarkers of inflammation such as CRP are associated with increased risk of cardiovascular events, independent of cholesterol levels. The Canakinumab Anti-inflammatory Thrombosis Outcomes Study (CANTOS) was the first clinical trial to show that reducing vascular inflammation in the absence of concomitant lipid lowering reduces the rates of cardiovascular events. N Engl J Med 2017; 377:1119-1131. Canakinumab is an anti-interleukin-1 beta (IL-1β) human monoclonal antibody approved for clinical use in rheumatologic disorders. IL-1β is a proinflammatory cytokine that induces IL-6 and thereby elevates the downstream inflammatory biomarker high sensitivity CRP (hsCRP). Therefore, CANTOS provides proof of concept that therapies targeting IL-1β could reduce rates of MACE in certain patients in a manner that is complimentary and potentially additive to the LDL-lowering standard of care.

[0008] There is a need for additional, non-surgical therapeutic approaches beyond the standard of care cholesterol-lowering medications for slowing the progression of atherosclerosis and decreasing the risk of MACE. In addition, patients suffering from inflammatory disorders would benefit from orally administered agents which block the same cytokine, IL-1β, as canakinumab.

### SUMMARY

[0009] The present disclosure provides certain cyclic peptides that reduce inflammation by binding to the IL-1β cytokine and prevent engagement with the TL-1 receptor, resulting in inhibition of downstream pro-inflammatory signaling. These cyclic peptides can be valuable pharmaceutically active compounds for the treatment of cardiovascular diseases and inflammatory disorders. In one aspect, the present disclosure provides compounds of Formula (I)

[chemical structure]

and their pharmaceutically acceptable salts.

[0010] The compounds can trap IL-1β and thereby affect the downstream pro-inflammatory signaling pathway which may be associated with cardiovascular disorders. Accordingly, in another aspect, the present disclosure provides a method for treating a cardiovascular disorder (e.g., atherosclerosis, vascular inflammation) comprising administering a therapeutically effective amount of the compound of the disclosure to a subject in need thereof. In some embodiments, the administration comprises an oral administration of the compound.

[0011] The disclosure furthermore provides processes for preparing compounds of the disclosure and pharmaceutical compositions which comprise compounds of the disclosure and a pharmaceutically acceptable carrier.

### BRIEF DESCRIPTION OF THE DRAWINGS

[0012] FIG. 1 describes the amino acid sequences of SEQ ID NOS: 1-465 and their associated properties.

### DETAILED DESCRIPTION

### Compounds of the Disclosure

[0013] In one embodiment, the present disclosure provides a compound having structural Formula (I) as shown above wherein:
[0014] R¹ is
   [0015] (i) R^{1a}—C(O)N(H)—CH₂CH₂—O—, wherein
      [0016] R^{1a} is
         [0017] (a) C₁-C₃ alkyl or
         [0018] (b) (CH₃)₃N—CH₂CH₂-M-, wherein:
         M is —CH₂—, —CH₂CH₂—, —CH₂CH₂CH₂—, —O—CH₂CH₂—, or —O—CH₂CH₂—O—CH₂CH₂—;
   [0019] (ii) (CH₃)₃N—CH₂CH₂—O—;
   [0020] (iii) C¹, wherein C¹ is:
      [0021] (a) phenyl or a 5- to 6-membered monocyclic heteroaryl, wherein said 5- to 6-membered monocyclic heteroaryl contains 1 to 3 heteroatoms independently selected from the group consisting of N, O, and S;
      [0022] (b) a 5- to 6-membered heterocycloalkyl, wherein said 5- to 6-membered heterocycloalkyl is saturated and contains 1 or 2 heteroatoms selected from the group consisting of N, O, and S;
         [0023] wherein C¹ is unsubstituted or substituted by 1 to 3 R^{C1} substituents independently selected from the group consisting of halo, C₁-C₃ alkyl, C₁-C₃ fluoroalkyl, carboxy, C₁-C₃ alkoxy, C₂-C₃ acyl, and C₁-C₃ alkoxymethyl;
   [0024] (iii) (CH₃)₃N—CH₂CH₂—O—; or
   [0025] (iv) a group

[chemical structure]

[0026] R^{A} is:
   [0027] (i) —CO₂H;
   [0028] (ii) —CO₂NH₂;
   [0029] (iii) —S(O)₂NH₂; or
   [0030] (iv) a 5-membered heteroaryl containing 2 or 3 heteroatoms independently selected from the group consisting of N, O, and S;
      [0031] wherein the 5-membered heteroaryl is unsubstituted or substituted by 1 to 2 substituents independently selected from the group consisting of halo, C₁-C₃ alkyl, C₁-C₃ alkoxy, oxo, and C₁-C₃ alkoxymethyl;
[0032] R^{B} is amino, hydroxy, or fluoro;
[0033] R² is
   [0034] (i) naphthyl; or
   [0035] (ii) a 9- to 10-membered bicyclic heteroaryl, wherein said 9- to 10-membered bicyclic heteroaryl contains 1 to 2 heteroatoms independently selected from the group consisting of N, O, and S;
      [0036] wherein R² is unsubstituted or substituted by 1 to 2 R^{2a} substituents independently selected from the group consisting of halo, C₁-C₃ alkyl and C₁-C₃ alkoxy;
[0037] R³ is —(CH₂)ₘCO₂H, —(CH₂)ₘCO₂NH₂, —(CH₂)ₘCO₂N(CH₃)₂, —(CH₂)ₘCH₂N(H)C(O)NH₂, or —(CH₂)ₘ—C³;
   [0038] wherein C³ is a 5-membered heteroaryl containing 2 to 4 heteroatoms selected from the group consisting of N, O, and S;
      [0039] wherein C³ is unsubstituted or substituted by 1 to 2 substituent selected from the group consisting of halo and C₁-C₃ alkyl;
[0040] R⁴ is C₁-C₃ alkyl;
[0041] R⁵ is H, C₁-C₃ alkyl, or —CH₂CO₂H;
   [0042] or alternatively R⁴ and R⁵ together with the atoms to which they are attached form a pyrrolidinyl, piperidinyl or azepinyl ring;
[0043] X¹, X², and X³ are independently C(H) or N;
[0044] R^{D} is:
   [0045] (i) ring C^{D}, wherein ring C^{D} is:
      [0046] (a) phenyl; or
      [0047] (b) cyclohexyl;
      [0048] wherein ring C^{D} is substituted by one A¹; wherein A¹ is —CO₂H, —CONH₂, or —N(H)SO₂CH₃;
   [0049] (ii) hydroxy;
   [0050] (iii) —CO₂NH₂; or
   [0051] (iv) —OCH₂CH₂C(O)N(H)C(O)CH₃;
[0052] A² is H, halo or C₁-C₃ alkyl;
[0053] R⁶ is —H, —NH₂, —C(O)N(CH₃)₂; —(CH₂)ₙNH₂; —(CH₂)ₙN(H)CH₃; —(CH₂)ₙN(CH₃)₃; —OH; —(CH₂)ₙOH; —OCH₃; —(CH₂)ₙOCH₃; —(CH₂)ₙCH₃; —(CH₂)ₙN(H)C(O)NH₂; —(CH₂)ₙCH₂C(O)OH; —(CH₂)ₙN(H)C(O)CH₂CH₂O(CH₂CH₂—O)q-CH₂CH₂N(CH₃)₃; or —C⁶;
   [0054] C⁶ is
      [0055] (i) a 5- to 6-membered monocyclic aryl or heteroaryl, wherein said 5- to 6-membered monocyclic heteroaryl contains 1 to 3 heteroatoms independently selected from the group consisting of N, O, and S;
      [0056] (ii) a 9- to 10-membered bicyclic aryl or heteroaryl, wherein said 9- to 10-membered bicyclic heteroaryl contains 1 to 4 heteroatoms independently selected from the group consisting of N, O, and S; and
      [0057] (iii) a 3- to 8-membered mono- or bicyclic cycloalkyl;
         [0058] wherein C⁶ is unsubstituted or substituted by 1 to 3 R^{C6} substituents independently selected from the group consisting of halo, amino, hydroxy, carboxy, C₁-C₃ alkyl, C₁-C₃ fluoroalkyl, C₁-C₃ alkoxy, and C₁-C₃ alkoxymethyl;
[0059] R⁷ is H, C₁-C₄ alkyl, —(CH₂)ᵤOH, —(CH₂)ᵤC(O)N(CH₃)₂, —(CH₂)ᵤN(CH₃)₃, —(CH₂)ᵤOCH₃, —(CH₂)ᵤC(O)NC(O)NH₂, —(CH₂)ᵤN(H)C(O)CH₂CH₂O(CH₂CH₂—O)ᵥ—CH₂CH₂N(CH₃)₃, or —CH₂—C⁷;
   [0060] C⁷ is:
      [0061] (i) a 5-membered heteroaryl containing 2 to 4 heteroatoms selected from the group consisting of N, O, and S; or
      [0062] (ii) a 5- to 6-membered heterocycloalkyl, wherein said 5- to 6-membered heterocycloalkyl is saturated and contains 1 O atom;
      [0063] wherein C⁷ is unsubstituted or substituted by 1 to 2 substituents selected from the group consisting of halo, C₁-C₃ alkyl, C₁-C₃ alkoxy, and C₁-C₃ alkoxymethyl;
[0064] R⁸ is —H, —F, —OH, —NH₂, —N(CH₃)₃, (CH₃)₃N—(CH₂)ᵣ—C(O)—, or (CH₃)₃N—CH₂CH₂—O—(CH₂CH₂—O)ₛ—CH₂CH₂—C(O)—
[0065] R⁹ is —C⁹ or —CH₂—C⁹;
   [0066] C⁹ is phenyl or a 5- to 6-membered monocyclic heteroaryl, wherein said 5- to 6-membered monocyclic heteroaryl contains 1 to 2 heteroatoms independently selected from the group consisting of N, O, and S;
      [0067] wherein C⁹ is unsubstituted or substituted by 1 to 3 R^{C9} substituents independently selected from the group consisting of halo, amino, hydroxy, C₁-C₃ alkyl, C₁-C₃ fluoroalkyl, and C₁-C₃ alkoxy;
      [0068] wherein C⁹ is optionally substituted by 1 ring R^{C9C}, the ring R^{C9C} is:
         [0069] (a) phenyl; or
         [0070] (b) a 5- to 6-membered monocyclic heteroaryl containing 1 to 2 heteroatoms independently selected from the group consisting of N, O, and S;
[0071] subscript m is 1 or 2;
[0072] subscript n is 1, 2, or 3; and
[0073] subscript q is 1, 2, or 3;
[0074] subscript r is 3, 4, 5, or 6;
[0075] subscript s is 1 or 2;
[0076] subscript t is 0 or 1;
[0077] subscript u is 0, 1, 2, 3, or 4;
[0078] subscript v is 1, 2, or 3; and
[0079] subscript w is 0 or 1; or
   a pharmaceutically acceptable salt thereof.

[0080] In another embodiment, the present disclosure provides a compound Formula (I), wherein:
[0081] C¹ is phenyl;
[0082] R² is indolyl or naphthyl;
[0083] C⁶ is phenyl, indolyl, pyridyl, pyridazinyl, or bicyclo[1.1.1]pentanyl; and
[0084] C⁹ is phenyl or pyrimidinyl.

[0085] In another embodiment, the present disclosure provides a compound of Formula (I), wherein R¹ is CH₃—C(O)N(H)—CH₂CH₂—O— or 4-fluorophenyl.

[0086] In another embodiment, the present disclosure provides a compound of Formula (I), wherein R¹ is (CH₃)₃N—CH₂CH₂-M-, wherein M is CH₂—, —CH₂CH₂CH₂—, —O—CH₂CH₂—, or —O—CH₂CH₂—O—CH₂CH₂—.

[0087] In another embodiment, the present disclosure provides a compound of Formula (I), wherein R¹ is C¹.

[0088] In another embodiment, the present disclosure provides a compound of Formula (I), wherein A² is H, fluoro, chloro, or methyl.

[0089] In another embodiment, the present disclosure provides a compound of Formula (I), wherein R² is unsubstituted or substituted naphthyl or indolyl.

[0090] In another embodiment, the present disclosure provides a compound of Formula (I), wherein R³ is —(CH₂)ₘCO₂H.

[0091] In another embodiment, the present disclosure provides a compound of Formula (I), wherein subscript m is 1.

[0092] In another embodiment, the present disclosure provides a compound of Formula (I), wherein R⁴ and R⁵ are methyl.

[0093] In another embodiment, the present disclosure provides a compound of Formula (I), wherein:
[0094] X¹ and X² are C(H) and
[0095] A¹ is carboxy.

[0096] In another embodiment, the present disclosure provides a compound of Formula (I), wherein:
[0097] (i) a substituted or unsubstituted 5- to 6-membered monocyclic aryl or heteroaryl, wherein said 5- to 6-membered monocyclic heteroaryl contains 1 to 2 N atoms; or
[0098] (ii) a substituted or unsubstituted 9- to 10-membered bicyclic heteroaryl, wherein said bicyclic heteroaryl contains 1 to 2 N atoms.

[0099] In another embodiment, the present disclosure provides a compound of Formula (I), wherein R⁶ is indolyl.

[0100] In another embodiment, the present disclosure provides a compound of Formula (I), wherein R⁷ is H.

[0101] In another embodiment, the present disclosure provides a compound of Formula (I), wherein R⁸ is —H, —OH, —NH₂, (CH₃)₃N—(CH₂)₅—C(O)—, or (CH₃)₃N—CH₂CH₂—O—CH₂CH₂—O—CH₂CH₂—C(O)—.

[0102] In another embodiment, the present disclosure provides a compound of Formula (I), wherein R⁸ is H or —NH₂.

[0103] In another embodiment, the present disclosure provides a compound of Formula (I), wherein R⁹ is substituted on position 4 of the illustrated pyrrolidinyl ring.

[0104] In another embodiment, the present disclosure provides a compound of Formula (I), wherein C⁹ is substituted or unsubstituted phenyl or pyrimidinyl.

[0105] In another embodiment, the present disclosure provides a compound of Formula (I), wherein R⁹ is —CH₂-(4-fluorophenyl) or pyrimidin-5-yl.

[0106] In another embodiment, the present disclosure provides a compound of Formula (I), wherein:
[0107] R¹ is CH₃—C(O)N(H)—CH₂CH₂—O— or 4-fluorophenyl;
[0108] R² is unsubstituted or substituted naphthyl or indolyl;
[0109] R³ is —(CH₂)ₘCO₂H;
[0110] R⁴ and R⁵ are methyl;
[0111] X¹ and X² are C(H);
[0112] A¹ is carboxy;
[0113] A² is H;
[0114] R⁶ is
   [0115] (i) a substituted or unsubstituted 5- to 6-membered monocyclic aryl or heteroaryl, wherein said 5- to 6-membered monocyclic heteroaryl contains 1 to 2 N atoms; or
   [0116] (ii) a substituted or unsubstituted 9- to 10-membered bicyclic heteroaryl, wherein said 9- to 10-membered bicyclic heteroaryl contains 1 to 2 N atoms;
[0117] R⁷ is H;
[0118] R⁸ is H or —NH₂; and
[0119] R⁹ is substituted on position 4 of the illustrated pyrrolidinyl ring.

[0120] In one aspect of this embodiment, the present disclosure provides a compound of Formula (I), wherein:
[0121] R⁶ is indolyl;
[0122] R⁹ is —CH₂-(4-fluorophenyl) or pyrimidin-5-yl, substituted on the 4-position of the illustrated pyrrolidinyl ring; and
[0123] subscript m is 1.

[0124] In some embodiments, the compound of Formula (I) has Formula (IA)

[chemical structure]

wherein:
[0125] R¹ is:
   [0126] (i) R^{1a}—C(O)N(H)—CH₂CH₂—O—, wherein R^{1a} is:
      [0127] (a) methyl; or
      [0128] (b) (CH₃)₃N—CH₂CH₂—O—CH₂CH₂—;
   [0129] (ii) (CH₃)₃N—CH₂CH₂—O—; or
   [0130] (iii) 4-carboxyphenyl;
[0131] R² is a group

[chemical structure]

[0132] R^{2a} is halo or methyl;
[0133] subscript x is 0 or 1;
[0134] R³ is —CH₂CO₂H or —CH₂-tetrazolyl;
[0135] R⁴ and R⁵ are methyl;
   [0136] or alternatively R⁴ and R⁵ together with the atoms to which they are attached form a piperidinyl ring;
[0137] R^{D} is 4-carboxyphenyl or hydroxy;
[0138] R⁶ is a group selected from:

[chemical structure]

[0139] R⁷ is H or methyl;
[0140] R⁸ is —H, —NH₂, or —OH;
[0141] C⁹ is a group selected from

[chemical structure]

[0142] In other embodiments, the compound of Formula (I) has Formula (IB):

[chemical structure]

wherein:
[0143] R¹ is
   [0144] (i) R^{1a}—C(O)N(H)—CH₂CH₂—O—, wherein
      [0145] R^{1a} is
         [0146] (a) C₁-C₃ alkyl or
         [0147] (b) (CH₃)₃N—CH₂CH₂-M-, wherein
         M is —CH₂—, —CH₂CH₂—, —CH₂CH₂CH₂—, —O—CH₂CH₂—, or —O—CH₂CH₂—O—CH₂CH₂—; or
   [0148] (ii) C¹, wherein C¹ is phenyl or a 5- to 6-membered monocyclic aryl or heteroaryl, wherein said 5- to 6-membered monocyclic heteroaryl contains 1 to 2 heteroatoms independently selected from the group consisting of N, O, and S;
      [0149] wherein C¹ is unsubstituted or substituted by 1 to 3 R^{C1} substituents independently selected from the group consisting of halo, C₁-C₃ alkyl, C₁-C₃ fluoroalkyl, carboxy, C₁-C₃ alkoxy, and C₂-C₃ acyl;
[0150] R² is
   [0151] (i) naphthyl; or
   [0152] (ii) a 9- to 10-membered bicyclic heteroaryl, wherein said 9- to 10-membered bicyclic heteroaryl contains 1 to 2 heteroatoms independently selected from the group consisting of N, O, and S;
      [0153] wherein R² is unsubstituted or substituted by 1 to 2 R^{2a} substituents independently selected from the group consisting of halo;
[0154] R³ is —(CH₂)ₘCO₂H, —(CH₂)ₘCO₂NH₂, —(CH₂)ₘCO₂N(CH₃)₂, or —(CH₂)ₘ-tetrazolyl;
[0155] R⁴ is C₁-C₃ alkyl;
[0156] R⁵ is H or C₁-C₃ alkyl;
   [0157] or alternatively R⁴ and R⁵ together with the atoms to which they are attached form a pyrrolidinyl, piperidinyl or azepinyl ring;
[0158] X¹ and X² are independently C(H) or N;
[0159] A¹ is —CO₂H or —N(H)SO₂CH₃;
[0160] A² is H, halo or C₁-C₃ alkyl;
[0161] R⁶ is —(CH₂)ₙNH₂; —(CH₂)ₙN(H)CH₃; —(CH₂)ₙOH; —(CH₂)ₙOCH₃; —(CH₂)ₙN(H)CH₂CH₂O(CH₂CH₂—O)q-CH₂CH₂N(CH₃)₃; or —C⁶;
   [0162] C⁶ is
      [0163] (i) a 5- to 6-membered monocyclic aryl or heteroaryl, wherein said 5- to 6-membered monocyclic heteroaryl contains 1 to 2 heteroatoms independently selected from the group consisting of N, O, and S;
      [0164] (ii) a 9- to 10-membered bicyclic aryl or heteroaryl, wherein said 9- to 10-membered bicyclic heteroaryl contains 1 to 4 heteroatoms independently selected from the group consisting of N, O, and S; and
      [0165] (iii) a 3- to 8-membered mono- or bicyclic cycloalkyl;
         [0166] wherein C⁶ is unsubstituted or substituted by 1 to 3 R^{C6} substituents independently selected from the group consisting of halo, amino, hydroxy, carboxy, C₁-C₃ alkyl, C₁-C₃ fluoroalkyl, and C₁-C₃ alkoxy;
[0167] R⁷ is H or C₁-C₄ alkyl;
[0168] R⁸ is —H, —OH, —NH₂, (CH₃)₃N—(CH₂)ᵣ—C(O)—, or (CH₃)₃N—CH₂CH₂—O—(CH₂CH₂—O)ₛ—CH₂CH₂—C(O)—
[0169] R⁹ is —C⁹ or —CH₂—C⁹;
   [0170] C⁹ is phenyl or a 5- to 6-membered monocyclic heteroaryl, wherein said 5- to 6-membered monocyclic heteroaryl contains 1 to 2 heteroatoms independently selected from the group consisting of N, O, and S;
      [0171] wherein C⁹ is unsubstituted or substituted by 1 to 3 R^{C9} substituents independently selected from the group consisting of halo, amino, hydroxy, C₁-C₃ alkyl, C₁-C₃ fluoroalkyl, C₁-C₃ alkoxy, and phenyl;
[0172] subscript m is 1 or 2;
[0173] subscript n is 1, 2, or 3; and
[0174] subscript q is 1 or 2;
[0175] subscript r is 3, 4, 5, or 6;
[0176] subscript s is 1 or 2; or
   a pharmaceutically acceptable salt thereof.

[0177] In certain embodiments, the present disclosure provides a compound of Formula (I), wherein the compound is selected from the group consisting of SEQ ID NOS: 1-465 as set forth in FIG. 1. In specific embodiments, the compound is selected from the group consisting of SEQ ID NOS: 1-103 as set forth in FIG. 1.

[0178] In specific embodiments, the present disclosure provides a compound of Formula (I), wherein the compound selected from the group consisting of (SEQ ID NOs: 1, 2, 78, 80, 82, 92, 94, 95, 98, 99, 100, 101, 102, 215, 216, 217, and 218, respectively):

[chemical structure]

[chemical structure]

[chemical structure]

[chemical structure]

[chemical structure]

[chemical structure]

[0179] While not being bound by any specific theory, the Applicants believe that the compounds of the disclosure trap interleukin-1β, prevent signaling through the IL-1 receptor and hence reduce the downstream markers IL-6 and CRP. Hence the compounds can be useful to treat the inflammatory components of cardiovascular diseases such as ASCVD and heart failure with preserved ejection fraction (HFpEF). The compounds can also be useful to treat inflammatory disorders such as hidradenitis suppurativa (acne inversa), inflammatory bowel disease, and osteoarthritis.

### Definitions

[0180] Unless defined otherwise, all technical and scientific terms used herein have the same meaning as is commonly understood by one of skill in the art to which this invention belongs.

[0181] As used throughout this disclosure, “a compound of the disclosure”, “a compound of the present disclosure” and “a compound disclosed herein” are used interchangeably are to be understood to include the disclosed cyclic peptides and compounds of Formula (I). Reference to the compounds of Formula (I) herein encompass the compounds of each of Formulas (IA) and (IB), and all embodiments and classes thereof. The compounds of Formula (I) can form salts which are also within the scope of the present disclosure. Reference to a compound of the disclosure (or compound of Formula (I)) herein is understood to include reference to salts thereof, unless otherwise indicated. The term “salt(s)”, as employed herein, denotes acidic salts formed with inorganic and/or organic acids, as well as basic salts formed with inorganic and/or organic bases. In addition, when a compound of Formula (I) contains both a basic moiety, such as, but not limited to an amino group, pyrrolidine or imidazole, and an acidic moiety, such as, but not limited to a carboxylic acid, zwitterions (“inner salts”) may be formed and are included within the term “salt(s)” as used herein. In one embodiment, the salt is a pharmaceutically acceptable (i.e., non-toxic, physiologically acceptable) salt. In another embodiment, the salt is other than a pharmaceutically acceptable salt. Salts of the compounds of Formula (I) may be formed, for example, by reacting a compound of Formula (I) with an amount of acid or base, such as an equivalent amount, in a medium such as one in which the salt precipitates or in an aqueous medium followed by lyophilization.

[0182] “Acyl” means an alkyl-C(O)— group, wherein alkyl is as defined below. The bond to the parent group is through the carbon atom of the carbonyl group.

[0183] “Alkyl”, as well as other groups having the prefix “alk”, such as alkoxy, and the like, means carbon chains which may be linear or branched, or combinations thereof, containing the indicated number of carbon atoms. For instance, a C₁-C₆ alkyl means an alkyl group having one (i.e., methyl) up to 6 carbon atoms (i.e., hexyl). In particular embodiments, linear alkyl groups have 1-6 carbon atoms and branched alkyl groups have 3-7 carbon atoms. Examples of alkyl groups include methyl, ethyl, propyl, isopropyl, butyl, sec- and tert-butyl, pentyl, hexyl, heptyl, octyl, nonyl and the like.

[0184] “Alkoxy” and “alkyl-O—” are used interchangeably and refer to an alkyl group linked to oxygen.

[0185] “Amino” means a H₂N— group. The bond to the parent group is through the nitrogen atom.

[0186] “Amino acid” refers to naturally-occurring α-amino acids and their stereoisomers, as well as unnatural amino acids (such as β-amino acids and substituted amino acids) and their stereoisomers. In the sequences given for the peptides (compounds) according to the present disclosure, the amino acid residues have their conventional meaning. Thus, “G” is glycine, “W” is tryptophan, “A” is alanine, “S” is serine, and so on. It is to be understood that “D” isomers are designated by a “d” before the one letter code or amino acid name, such that for example dA is the D isomer of L-alanine. Amino acid residues not encompassed by the foregoing have the definitions provided in the Table in the Examples section below.

[0187] “Aryl”, as used herein, represents a monocyclic 6-membered or bicyclic 10-membered ring system, wherein at least one ring is aromatic, and all the ring atoms are carbon.

[0188] “Bicyclic ring system” refers to two joined rings. The rings may be fused, i.e., share two adjacent atoms, or “spirocyclic”, i.e., share only a single atom.

[0189] “Carboxy” means a HO₂C— group. The bond to the parent group is through the carbon atom of the carbonyl component.

[0190] “Cycloalkyl” means a saturated cyclic hydrocarbon radical. In particular embodiments, the cycloalkyl group has 3-12 carbon atoms, forming 1-3 carbocyclic rings that. The rings may be fused, or “spirocyclic”, i.e., share only a single atom, or “bridged”, i.e., share three or more atoms with two bridgehead atoms being connected by a bridge containing at least one atom. Examples of cycloalkyl include cyclopropyl, cyclobutyl, cyclopentyl, cyclohexyl, cycloheptyl, adamantyl, bicyclo[1.1.1]pentanyl, and the like.

[0191] “Fluoroalkyl” includes mono-substituted as well as multiple fluoro-substituted alkyl groups, up to perfluoro substituted alkyl. For example, fluoromethyl, 1,1-difluoroethyl, trifluoromethyl or 1,1,1,2,2-pentafluorobutyl are included.

[0192] “Halogen” or “halo”, unless otherwise indicated, includes fluorine (fluoro), chlorine (chloro), bromine (bromo) and iodine (iodo). In one embodiment, halo is fluoro (—F) or chloro (—Cl).

[0193] “Heterocycloalkyl” or “heterocyclyl” means a non-aromatic monocyclic, bicyclic or tricyclic ring system comprising about 3 to about 10 ring atoms, preferably about 5 to about 10 ring atoms, in which one or more of the atoms in the ring system is an element other than carbon, for example nitrogen, oxygen or sulfur, alone or in combination. The rings of bi- and tricyclic ring may be fused, or “spirocyclic”, i.e., share only a single atom, or “bridged”, i.e., share three or more atoms with two bridgehead atoms being connected by a bridge containing at least one atom. There are no adjacent oxygen and/or sulfur atoms present in the ring system. In some embodiments, heterocycloalkyls contain about 5 to about 6 ring atoms. The prefix aza, oxa or thia before the heterocycloalkyl root name means that at least a nitrogen, oxygen or sulfur atom respectively is present as a ring atom. In some embodiments, the nitrogen or sulfur atom of the heterocycloalkyl can be optionally oxidized to the corresponding N-oxide, S-oxide or S,S-dioxide. Non-limiting examples of suitable monocyclic heterocycloalkyl rings include piperidyl, pyrrolidinyl, piperazinyl, morpholinyl, thiomorpholinyl, thiazolidinyl, 1,4-dioxanyl, tetrahydrofuranyl, tetrahydropyranyl, tetrahydrothiophenyl, and the like.

[0194] “Heteroaryl” refers to aromatic monocyclic, bicyclic and tricyclic ring structures in which one or more atoms in the ring, the heteroatom(s), is an element other than carbon. Heteroatoms are typically O, S, or N atoms. Examples of heteroaromatic groups include pyridinyl, pyrimidinyl, pyrrolyl, pyridazinyl, isoxazolyl, thiazolyl, oxazolyl, indolyl, benzoxazolyl, benzothiazolyl, and imidazolyl.

[0195] When any variable (e.g., R^{C1}) occurs more than one time in any constituent or in Formula (I) or other generic formulas herein, its definition on each occurrence is independent of its definition at every other occurrence. Combinations of substituents and/or variables are permissible only if such combinations result in stable compounds. In choosing compounds of the present disclosure, one of ordinary skill in the art will recognize that the various substituents, e.g., R^{C9}, are to be chosen in conformity with well-known principles of chemical structure connectivity and stability. Unless expressly stated to the contrary, substitution by a named substituent is permitted on any atom in a ring (e.g., aryl, a heteroaryl ring, or a saturated heteroaryl ring) provided such ring substitution is chemically allowed and results in a stable compound. A “stable” compound is a compound which can be prepared and isolated and whose structure and properties remain or can be caused to remain essentially unchanged for a period of time sufficient to allow use of the compound for the purposes described herein (e.g., therapeutic or prophylactic administration to a subject).

[0196] The term “substituted” shall be deemed to include multiple degrees of substitution by a named substituent. Where multiple substituent moieties are disclosed or claimed, the substituted compound can be independently substituted by one or more of the disclosed or claimed substituent moieties, singly or plurally. By independently substituted, it is meant that the (two or more) substituents can be the same or different.

[0197] Unless expressly depicted or described otherwise, variables depicted in a structural formula with a “floating” bond, are permitted on any available carbon atom in the ring to which the variable is attached. When a moiety is noted as being “optionally substituted” in Formula (I) or any embodiment thereof, it means that Formula (I) or the embodiment thereof encompasses compounds that contain the noted substituent (or substituents) on the moiety and also compounds that do not contain the noted substituent (or substituents) on the moiety.

[0198] The wavy line [symbol] , as used herein, indicates a point of attachment to the rest of the compound.

[0199] Some of the compounds described herein may exist as tautomers which have different points of attachment of hydrogen accompanied by one or more double bond shifts. For example, a ketone and its enol form are keto-enol tautomers. The individual tautomers as well as mixtures thereof are encompassed with compounds of the present disclosure.

[0200] In the compounds of the disclosure, the atoms may exhibit their natural isotopic abundances, or one or more of the atoms may be artificially enriched in a particular isotope having the same atomic number, but an atomic mass or mass number different from the atomic mass or mass number predominantly found in nature. The present disclosure as described and claimed herein is meant to include all suitable isotopic variations of the compounds of the disclosure and embodiments thereof. For example, different isotopic forms of hydrogen (H) include protium (¹H) and deuterium (²H, also denoted herein as D). Protium is the predominant hydrogen isotope found in nature. Enriching for deuterium may afford certain therapeutic advantages, such as increasing in vivo half-life or reducing dosage requirements or may provide a compound useful as a standard for characterization of biological samples. Isotopically-enriched compounds of the disclosure, can be prepared without undue experimentation by conventional techniques well known to those skilled in the art or by processes analogous to those described in the Schemes and Examples herein using appropriate isotopically-enriched reagents and/or intermediates.

[0201] The term “pharmaceutically acceptable salts” refers to salts prepared from pharmaceutically acceptable non-toxic bases or acids. When the compound of the present disclosure is acidic (or has a functional group which may be anionic), its corresponding salt can be conveniently prepared from pharmaceutically acceptable non-toxic bases, including inorganic bases and organic bases. Examples of suitable inorganic cations include, but are not limited to, alkali metal ions such as Li⁺, Na⁺, and K⁺, alkaline earth metal cations such as Ca2⁺, and Mg2⁺, and other cations such as Al³⁺ and Zn⁺. Examples of suitable organic cations include, but are not limited to, ammonium ion (i.e., NH₄⁺) and substituted ammonium ions. Examples of suitable substituted ammonium ions are those derived from methylamine, ethylamine, diethylamine, triethylamine and ethylenediamine. When a compound of the present disclosure is basic, its corresponding salt can be conveniently prepared from pharmaceutically acceptable non-toxic acids, including inorganic acids and organic acids. Example of such acid addition salts include salts formed from hydrohalic acids (e.g., hydrochloric, hydrobromic, hydroiodic), formic acid, acetic acid, capric acid, and citric acids. Salts containing acetate, formate, caprate, chloride, or sodium salts are typical for use with the compounds of the present disclosure. In some embodiments, salts of compounds of the present disclosure can be formed by exchange well-known to those of ordinary skill in the art, such as by anion exchange, e.g., replacement of trifluoroacetate ions with chloride ions.

[0202] Furthermore, compounds of the present disclosure may exist in amorphous form and/or one or more crystalline forms, and as such all amorphous and crystalline forms and mixtures thereof of the compounds of Formula (I), including the Examples, are intended to be included within the scope of the present disclosure. In addition, some of the compounds of the instant disclosure may form solvates with water (i.e., a hydrate) or common organic solvents such as, but not limited to, acetic acid or acetonitrile. Such solvates and hydrates, particularly the pharmaceutically acceptable solvates and hydrates, of the instant compounds are likewise encompassed within the scope of this disclosure, along with un-solvated and anhydrous forms.

[0203] Any pharmaceutically acceptable pro-drug modification of a compound of this disclosure which results in conversion in vivo to a compound within the scope of this disclosure is also within the scope of this disclosure.

[0204] The present disclosure also relates to processes for the preparation of the compounds of Formula (I) which are described in the following Examples and by which the compounds of the disclosure are obtainable.

[0205] “Treatment” and “treating” refer to all processes in which there may be a slowing, interrupting, arresting, controlling, or stopping of the progression of a disease or disorder described herein. The terms do not necessarily indicate a total elimination of all disease or disorder symptoms.

[0206] “Preventing,” or “prophylaxis,” as used herein, refers to reducing the likelihood of contracting disease or disorder described herein, or reducing the severity of a disease or disorder described herein.

[0207] The terms “therapeutically effective (or efficacious) amount” and similar descriptions such as “an amount efficacious for treatment” or “an effective dose” are intended to mean that amount of a compound of the disclosure that will elicit the biological or medical response of a tissue, a system, animal or human that is being sought by a researcher, veterinarian, medical doctor or other clinician. In a preferred embodiment, the term “therapeutically effective amount” means an amount of a compound of the disclosure that alleviates at least one clinical symptom in a human patient. The terms “prophylactically effective (or efficacious) amount” and similar descriptions such as “an amount efficacious for prevention” are intended to mean that amount of a compound of the disclosure that will prevent or reduce the risk of occurrence of the biological or medical event that is sought to be prevented in a tissue, a system, animal or human by a researcher, veterinarian, medical doctor or other clinician.

### Dosages of the Compounds of the Present Disclosure

[0208] The dosage regimen utilizing a compound of the present disclosure is selected in accordance with a variety of factors including type, species, age, weight, sex and medical condition of the patient; the severity of the condition to be treated; the potency of the compound chosen to be administered; the route of administration; and the renal and hepatic function of the patient. A consideration of these factors is well within the purview of the ordinarily skilled clinician for the purpose of determining the therapeutically effective or prophylactically effective dosage amount needed to prevent, counter, or arrest the progress of the condition. It is understood that a specific daily dosage amount can simultaneously be both a therapeutically effective amount, e.g., for treatment of an oncological condition, and a prophylactically effective amount, e.g., for prevention of an oncological condition.

[0209] While individual needs vary, determination of optimal ranges of effective amounts of the compound of the present disclosure is within the skill of the art. For administration to a human in the curative or prophylactic treatment of the conditions and disorders identified herein, for example, typical dosages of the compounds of the present disclosure can be about 0.05 mg/kg/day to about 50 mg/kg/day. In some embodiments, a patient is administered from about 5 mg/day to about 120 mg/day, such as from 10 mg/day, 20 mg/day, 30 mg/day, 40 mg/day, 50 mg/day, 60 mg/day, 70 mg/day, 80 mg/day, mg/day, 90 mg/day, or 100 mg/day of a compound of the present disclosure. In certain embodiments, a patient is administered from about 0.2 mg/kg to about 5 mg/kg, such as from 0.5 mg/kg, 0.75 mg/kg, 1.0 mg/kg, 1.25 mg/kg, or 1.5 mg/kg of a compound of the present disclosure. Such doses may be administered in a single dose or may be divided into multiple doses.

### Pharmaceutical Compositions

[0210] The compounds of the disclosure and their pharmaceutically acceptable salts can be administered to animals, preferably to mammals, and particularly to humans, as pharmaceuticals by themselves, in mixtures with one another or in the form of pharmaceutical compositions. The term “subject” or “patient” includes animals, preferably mammals and especially humans, who use the instant active agents for the prevention or treatment of a medical condition. Administering of the drug to the subject includes both self-administration and administration to the patient by another person. The subject may be in need of, or desire, treatment for an existing disease or medical condition, or may be in need of or desire prophylactic treatment to prevent or reduce the risk of occurrence of the disease or medical condition. As used herein, a subject “in need” of treatment of an existing condition or of prophylactic treatment encompasses both a determination of need by a medical professional as well as the desire of a patient for such treatment.

[0211] The present disclosure therefore also provides the compounds of the disclosure and their pharmaceutically acceptable salts for use as pharmaceuticals, their use for modulating the activity of the cytokine IL-1β, and in particular, their use in the therapy and prophylaxis of the below-mentioned diseases or disorders as well as their use for preparing medicaments for these purposes. In certain embodiments, the compounds of the disclosure and their pharmaceutically acceptable salts trap IL-1β.

[0212] Furthermore, the present disclosure provides pharmaceutical compositions which comprise as active component an effective dose of at least one compound of the disclosure and/or a pharmaceutically acceptable salt thereof and a customary pharmaceutically acceptable carrier, i.e., one or more pharmaceutically acceptable carrier substances and/or additives.

[0213] Thus, the present disclosure provides, for example, said compound and its pharmaceutically acceptable salts for use as pharmaceutical compositions which comprise as active component an effective dose of the compound of the disclosure and/or a pharmaceutically acceptable salt thereof and a customary pharmaceutically acceptable carrier, and the uses of said compound and/or a pharmaceutically acceptable salt thereof in the therapy or prophylaxis of the below-mentioned diseases or disorders, e.g., atherosclerosis, as well as their use for preparing medicaments for these purposes.

[0214] The pharmaceutical compositions according to the disclosure can be administered orally, for example, in the form of pills, tablets, lacquered tablets, sugar-coated tablets, granules, hard and soft gelatin capsules, aqueous, alcoholic or oily solutions, syrups, emulsions or suspensions, or rectally, for example, in the form of suppositories. Administration can also be carried out parenterally, for example, subcutaneously, intramuscularly or intravenously in the form of solutions for injection or infusion.

[0215] Other suitable administration forms are, for example, percutaneous or topical administration, for example, in the form of ointments, tinctures, sprays or transdermal therapeutic systems, or, for example, microcapsules, implants or rods. The preferred administration form depends, for example, on the disease to be treated and on its severity.

[0216] The present disclosure also provides pharmaceutical compositions comprising a compound of Formula (I). The compound of Formula (I) can be used in combination with any suitable pharmaceutical carrier or excipient. Such pharmaceutical compositions comprise a therapeutically effective amount of one or more compounds of Formula (I), and pharmaceutically acceptable excipient(s) and/or carrier(s). The specific pharmaceutic composition will suit the mode of administration. In particular aspects, the pharmaceutical acceptable carrier may be water or a buffered solution.

[0217] Excipients included in the pharmaceutical compositions have different purposes depending, for example on the nature of the drug, and the mode of administration. Examples of generally used excipients include, without limitation: saline, buffered saline, dextrose, water-for-infection, glycerol, ethanol, and combinations thereof, stabilizing agents, solubilizing agents and surfactants, buffers and preservatives, tonicity agents, bulking agents, lubricating agents (such as talc or silica, and fats, such as vegetable stearin, magnesium stearate or stearic acid), emulsifiers, suspending or viscosity agents, inert diluents, fillers (such as cellulose, dibasic calcium phosphate, vegetable fats and oils, lactose, sucrose, glucose, mannitol, sorbitol, calcium carbonate, and magnesium stearate), disintegrating agents (such as crosslinked polyvinyl pyrrolidone, sodium starch glycolate, cross-linked sodium carboxymethyl cellulose), binding agents (such as starches, gelatin, cellulose, methyl cellulose or modified cellulose such as microcrystalline cellulose, hydroxypropyl cellulose, sugars such as sucrose and lactose, or sugar alcohols such as xylitol, sorbitol or maltitol, polyvinylpyrrolidone and polyethylene glycol), wetting agents, antibacterials, chelating agents, coatings (such as a cellulose film coating, synthetic polymers, shellac, corn protein zein or other polysaccharides, and gelatin), preservatives (including vitamin A, vitamin E, vitamin C, retinyl palmitate, and selenium, cysteine, methionine, citric acid and sodium citrate, and synthetic preservatives, including methyl paraben and propyl paraben), sweeteners, perfuming agents, flavoring agents, coloring agents, absorption enhancers, administration aids, and combinations thereof.

[0218] Carriers are compounds and substances that improve and/or prolong the delivery of an active ingredient to a subject in the context of a pharmaceutical composition. Carriers may serve to prolong the in vivo activity of a drug or slow the release of the drug in a subject, using controlled-release technologies. Carriers may also decrease drug metabolism in a subject and/or reduce the toxicity of the drug. Carriers can also be used to target the delivery of the drug to particular cells or tissues in a subject. Common carriers (both hydrophilic and hydrophobic carriers) include fat emulsions, lipids, PEGylated phospholipids, PEGylated liposomes, PEGylated liposomes coated via a PEG spacer with a cyclic RGD peptide, liposomes and lipospheres, microspheres (including those made of biodegradable polymers or albumin), polymer matrices, biocompatible polymers, protein-DNA complexes, protein conjugates, erythrocytes, vesicles, nanoparticles, and side-chains for hydro-carbon stapling. The aforementioned carriers can also be used to increase cell membrane permeability of the compounds of Formula (I). In addition to their use in the pharmaceutical compositions of the present disclosure, carriers may also be used in compositions for other uses, such as research uses in vitro (e.g., for delivery to cultured cells) and/or in vivo.

[0219] Pharmaceutical compositions adapted for oral administration may be presented as discrete units such as capsules or tablets; as powders or granules; as solutions, syrups or suspensions (in aqueous or non-aqueous liquids; or as edible foams or whips; or as emulsions). Suitable excipients for tablets or hard gelatin capsules include lactose, maize starch or derivatives thereof, stearic acid or salts thereof. Suitable excipients for use with soft gelatin capsules include for example vegetable oils, waxes, fats, semi-solid, or liquid polyols etc. For the preparation of solutions and syrups, excipients which may be used include for example water, polyols and sugars. For the preparation of suspensions oils, e.g., vegetable oils, may be used to provide oil-in-water or water in oil suspensions. Excipients which promote absorption from the gastrointestinal tract, e.g., permeation enhancers, such as sodium caprate can be included. In certain situations, delayed release preparations may be advantageous and compositions which can deliver the compounds of the present disclosure in a delayed or controlled release manner may also be prepared. Prolonged gastric residence brings with it the problem of degradation by the enzymes present in the stomach and so enteric-coated capsules may also be prepared by standard techniques in the art where the active substance for release lower down in the gastro-intestinal tract.

[0220] Pharmaceutical compositions adapted for transdermal administration may be presented as discrete patches intended to remain in intimate contact with the epidermis of the recipient for a prolonged period of time. For example, the active ingredient may be delivered from the patch by iontophoresis as generally described in Pharmaceutical Research, 3(6):318 (1986).

[0221] Pharmaceutical compositions adapted for topical administration may be formulated as ointments, creams, suspensions, lotions, powders, solutions, pastes, gels, sprays, aerosols or oils. When formulated in an ointment, the active ingredient may be employed with either a paraffinic or a water-miscible ointment base. Alternatively, the active ingredient may be formulated in a cream with an oil-in-water cream base or a water-in-oil base. Pharmaceutical compositions adapted for topical administration to the eye include eye drops wherein the active ingredient is dissolved or suspended in a suitable carrier, especially an aqueous solvent. Pharmaceutical compositions adapted for topical administration in the mouth include lozenges, pastilles and mouth washes.

[0222] Pharmaceutical compositions adapted for rectal administration may be presented as suppositories or enemas.

[0223] Pharmaceutical compositions adapted for nasal administration wherein the carrier is a solid include a coarse powder having a particle size for example in the range 20 to 500 microns which is administered in the manner in which snuff is taken, i.e., by rapid inhalation through the nasal passage from a container of the powder held close up to the nose. Suitable compositions wherein the carrier is a liquid, for administration as a nasal spray or as nasal drops, include aqueous or oil solutions of the active ingredient.

[0224] Pharmaceutical compositions adapted for administration by inhalation include fine particle dusts or mists which may be generated by means of various types of metered dose pressurized aerosols, nebulizers or insufflators.

[0225] Pharmaceutical compositions adapted for vaginal administration may be presented as pessaries, tampons, creams, gels, pastes, foams or spray formulations.

[0226] Pharmaceutical compositions adapted for parenteral administration include aqueous and non-aqueous sterile injection solution which may contain anti-oxidants, buffers, bacteriostats and solutes which render the formulation substantially isotonic with the blood of the intended recipient; and aqueous and non-aqueous sterile suspensions which may include suspending agents and thickening agents. Excipients which may be used for injectable solutions include water-for-injection, alcohols, polyols, glycerin and vegetable oils, for example. The compositions may be presented in unit-dose or multi-dose containers, for example sealed ampoules and vials, and may be stored in a freeze-dried (lyophilized) condition requiring only the addition of the sterile liquid carrier, for example water or saline for injections, immediately prior to use. Extemporaneous injection solutions and suspensions may be prepared from sterile powders, granules and tablets. The pharmaceutical compositions may contain preserving agents, solubilizing agents, stabilizing agents, wetting agents, emulsifiers, sweeteners, colorants, odorants, salts (substances of the present disclosure may themselves be provided in the form of a pharmaceutically acceptable salt), buffers, coating agents or antioxidants. They may also contain therapeutically-active agents in addition to the compounds of the present disclosure.

### Methods of Using the Compounds of the Disclosure

[0227] The present application provides a method of IL-1 mediated cell signaling comprising contacting a cell with a compound of the disclosure or a pharmaceutically acceptable salt thereof. Inhibition of IL-1 mediated cell signaling can be assessed by detecting decreases in the levels of downstream biomarker IL-6 and CRP (e.g., hsCRP).

[0228] The present application also provides methods of using the compounds of the disclosure (or their pharmaceutically acceptable salts) or pharmaceutical compositions containing such compounds to treat disease conditions, including but not limited to, conditions implicated by IL-1β.

[0229] In some embodiments, the present disclosure provides a method of treating cardiovascular disease, the method comprising administering a therapeutically effective amount a compound of the disclosure (or a pharmaceutically acceptable salt thereof) or any of the foregoing pharmaceutical compositions comprising such a compound to a subject in need of such treatment. In some embodiments, the cardiovascular disease is vascular inflammation. In some embodiments, the cardiovascular disease is atherosclerosis. In some embodiments, the cardiovascular disease is heart failure with preserved ejection fraction (HFpEF). In other embodiments the cardiovascular disease is heart failure with reduced ejection fraction (HFrEF).

[0230] In some embodiments, the present disclosure provides a method of treating a chronic kidney disease, the method comprising administering a therapeutically effective amount a compound of the disclosure (or a pharmaceutically acceptable salt thereof) or any of the foregoing pharmaceutical compositions comprising such a compound to a subject in need of such treatment.

[0231] In some embodiments, the present disclosure provides a method of treating inflammatory disorders, the method comprising administering a therapeutically effective amount of a compound of the disclosure (or a pharmaceutically acceptable salt thereof) or any of the foregoing pharmaceutical compositions comprising such a compound to a subject in need of such treatment. In certain embodiments, the inflammatory disorder is selected from the group consisting of hidradenitis suppurativa (acne inversa), inflammatory bowel disease, arthritis, and nonalcoholic steatohepatitis (NASH).

[0232] In some embodiments, the inflammatory disorder is hidradenitis suppurativa (acne inversa).

[0233] In certain embodiments, the inflammatory disorder is inflammatory bowel disease, such as Crohn's disease or ulcerative colitis.

[0234] In some embodiments, the inflammatory disorder is arthritis, e.g., osteoarthritis, rheumatoid arthritis, psoriatic arthritis, or gouty arthritis.

[0235] In other embodiments, the inflammatory disorder is nonalcoholic steatohepatitis (NASH).

### Combination Therapies

[0236] One or more additional pharmacologically active agents may be administered in combination with a compound of the disclosure. An additional active agent (or agents) is intended to mean a pharmaceutically active agent (or agents) that is active in the body, including pro-drugs that convert to pharmaceutically active form after administration, which are different from the compound of Formula I, and also includes free-acid, free-base and pharmaceutically acceptable salts of said additional active agents. Generally, any suitable additional active agent or agents, including but not limited to anti-hypertensive agents, anti-atherosclerotic agents such as a lipid modifying compound, anti-diabetic agents and/or anti-obesity agents, anti-inflammatory agents, may be used in any combination with the compound of the disclosure in a single dosage formulation (a fixed dose drug combination), or may be administered to the subject in one or more separate dosage formulations which allows for concurrent or sequential administration of the active agents (co-administration of the separate active agents).

[0237] Examples of additional active agents which may be employed in treating cardiovascular disorders include but are not limited to angiotensin converting enzyme inhibitors (e.g., alacepril, benazepril, captopril, ceronapril, cilazapril, delapril, enalapril, enalaprilat, fosinopril, imidapril, lisinopril, moveltipril, perindopril, quinapril, ramipril, spirapril, temocapril, or trandolapril), angiotensin II receptor antagonists (e.g., losartan, i.e., COZAAR®, valsartan (including combinations with sacubitril), candesartan, olmesartan, telmesartan and any of these drugs used in combination with hydrochlorothiazide such as HYZAAR®); sGC activators (e.g., riociguat and vericiguat), PCSK9 inhibitors (e.g., evolocumab, alirocumab, MK-0616 and those disclosed in WO2019/246349), neutral endopeptidase inhibitors (e.g., thiorphan and phosphoramidon), aldosterone antagonists, aldosterone synthase inhibitors, renin inhibitors, endothelin receptor antagonists, phosphodiesterase-5 inhibitors (e.g., sildenafil, tadalafil and vardenafil), vasodilators, calcium channel blockers (e.g., amlodipine, nifedipine, verapamil, diltiazem, gallopamil, niludipine, nimodipins, nicardipine), potassium channel activators (e.g., nicorandil, pinacidil, cromakalim, minoxidil, aprilkalim, loprazolam), diuretics (e.g., hydrochlorothiazide), sympatholitics, beta-adrenergic blocking drugs (e.g., propranolol, atenolol, bisoprolol, carvedilol, metoprolol, or metoprolol tartate), alpha adrenergic blocking drugs (e.g., doxazocin, prazocin or alpha methyldopa) central alpha adrenergic agonists, peripheral vasodilators (e.g., hydralazine); lipid lowering agents e.g., HMG-CoA reductase inhibitors such as simvastatin and lovastatin which are marketed as ZOCOR® and MEVACOR® in lactone pro-drug form and function as inhibitors after administration, and pharmaceutically acceptable salts of dihydroxy open ring acid HMG-CoA reductase inhibitors such as atorvastatin (particularly the calcium salt sold in LIPITOR®), rosuvastatin (particularly the calcium salt sold in CRESTOR®), pravastatin (particularly the sodium salt sold in PRAVACHOL®), fluvastatin (particularly the sodium salt sold in LESCOL®), crivastatin, and pitavastatin; a cholesterol absorption inhibitor such as ezetimibe (ZETIA®) in combination with any other lipid lowering agents such as the HMG-CoA reductase inhibitors noted above and particularly with simvastatin (VYTORIN®) or with atorvastatin calcium; niacin in immediate-release or controlled release forms and/or with an HMG-CoA reductase inhibitor; niacin receptor agonists such as acipimox and acifran, as well as niacin receptor partial agonists; metabolic altering agents including insulin and insulin mimetics (e.g., insulin degludec, insulin glargine, insulin lispro), dipeptidyl peptidase-IV (DPP-4) inhibitors (e.g., sitagliptin, alogliptin, omarigliptin, linagliptin, vildagliptin); insulin sensitizers, including (i) PPARy agonists, such as the glitazones (e.g., pioglitazone, mitoglitazone, lobeglitazone, rosiglitazone, and balaglitazone), and other PPAR ligands, including (1) PPARα/γ dual agonists (e.g., chiglitazar, muraglitazar, aleglitazar, sodelglitazar, and naveglitazar); (2) PPARα agonists such as fenofibric acid derivatives (e.g., gemfibrozil, clofibrate, ciprofibrate, fenofibrate, bezafibrate), (3) selective PPAR γ modulators (SPPAR γ M's), (e.g., such as those disclosed in WO 02/060388, WO 02/08188, WO 2004/019869, WO 2004/020409, WO 2004/020408, and WO 2004/066963); and (4) PPAR γ partial agonists; (ii) biguanides, such as metformin and its pharmaceutically acceptable salts, in particular, metformin hydrochloride, and extended-release formulations thereof, such as Glumetza™, Fortamet™, and GlucophageXR™; and (iii) protein tyrosine phosphatase-1 B (PTP-1 B) inhibitors; insulin or insulin analogs (e.g., insulin detemir, insulin glulisine, insulin degludec, insulin glargine, insulin lispro and inhalable formulations of each); leptin and leptin derivatives and agonists; amylin and amylin analogs (e.g., pramlintide); sulfonylurea and non-sulfonylurea insulin secretagogues (e.g., tolbutamide, glyburide, glipizide, glimepiride, mitiglinide, meglitinides, nateglinide and repaglinide); α-glucosidase inhibitors (e.g., acarbose, voglibose and miglitol); glucagon receptor antagonists; incretin mimetics, such as GLP-1, GLP-1 analogs, derivatives, and mimetics; and GLP-1 receptor agonists (e.g., dulaglutide, semaglutide, albiglutide, exenatide, liraglutide, lixisenatide, taspoglutide, including intranasal, transdermal, and once-weekly formulations thereof); bile acid sequestering agents (e.g., colestilan, colestimide, colesevalam hydrochloride, colestipol, cholestyramine, and dialkylaminoalkyl derivatives of a cross-linked dextran), acyl CoA:cholesterol acyltransferase inhibitors, (e.g., avasimibe); antiobesity compounds; agents intended for use in inflammatory conditions, such as aspirin, non-steroidal anti-inflammatory drugs or NSAIDs, glucocorticoids, and selective cyclooxygenase-2 or COX-2 inhibitors; glucokinase activators (GKAs); inhibitors of 11β-hydroxysteroid dehydrogenase type 1, (e.g., such as those disclosed in U.S. Pat. No. 6,730,690); inhibitors of fructose 1,6-bisphosphatase, (e.g., such as those disclosed in U.S. Pat. Nos. 6,054,587; 6,110,903; 6,284,748; 6,399,782; and 6,489,476); inhibitors of acetyl CoA carboxylase-1 or 2 (ACC1 or ACC2); AMP-activated Protein Kinase (AMPK) activators; other agonists of the G-protein-coupled receptors: (i) GPR-109, (ii) GPR-119, and (iii) GPR-40; SSTR3 antagonists (e.g., such as those disclosed in WO 2009/001836); neuromedin U receptor agonists (e.g., such as those disclosed in WO 2009/042053, including, but not limited to, neuromedin S (NMS)); SCD modulators; GPR-105 antagonists (e.g., such as those disclosed in WO 2009/000087); SGLT inhibitors (e.g., empagliflozin, dapagliflozin, canagliflozin, ertugliflozin, remogloflozin, tofogliflozin, and ipragliflozin); inhibitors of acyl coenzyme A:diacylglycerol acyltransferase 1 and 2 (DGAT-1 and DGAT-2); inhibitors of fatty acid synthase; inhibitors of acyl coenzyme A:monoacylglycerol acyltransferase 1 and 2 (MGAT-1 and MGAT-2); agonists of the TGR5 receptor (also known as GPBAR1, BG37, GPCR19, GPR131, and M-BAR); ileal bile acid transporter inhibitors; PACAP, PACAP mimetics, and PACAP receptor 3 agonists; PPAR agonists; protein tyrosine phosphatase-1 B (PTP-1 B) inhibitors; IL-1β antibodies, (e.g., gevokizumab and canakinumab); and bromocriptine mesylate and rapid-release formulations thereof; or with other drugs beneficial for the treatment of the above-mentioned conditions or disorders including the free-acid, free-base, and pharmaceutically acceptable salt forms of the above active agents where chemically possible.

[0238] Examples of additional active agents which may be employed in treating inflammatory disorders include but are not limited to steroidal and non-steroidal anti-inflammatory agents, glucocorticoids, and therapeutic hormones. In particular embodiments, in treating hidradenitis suppurativa (acne inversa), the additional active agent can be an antibiotic, an injectable steroid, a therapeutic hormone, a TNF inhibitor (e.g., infliximab, adalimumab, etanercept, golimumab, certolizumab), a pain medication (e.g., codeine, hydrocodone, morphine, pregabalin, gabapentin, Intralesional triamcinolone, a corticosteroid, naproxen, ketoprofen, diclofenac, ibuprofen, acetaminophen). In other embodiments, in treating an inflammatory bowel disease, the additional active agent can be methotrexate, a TNF inhibitor, an oral sphingosine 1-phosphate receptor modulator (e.g., fingolimod, siponimod, ozanimod, ponesimod) or a selective JAK inhibitor (e.g., tofacitinib, baricitinib, upadacitinib). In some embodiments, in treating osteoarthritis, the additional active agent can be a pain medication (examples listed above). In other embodiments, in treating gouty arthritis, the additional active agent can be colcichine, a non-steroidal anti-inflammatory agent, or a glucocorticoid.

### Examples

### Methods of Preparing the Compounds of the Disclosure

[0239] The compounds described herein can be prepared according to the procedures of the following schemes and examples, using appropriate materials and are further exemplified by the following specific examples. The examples also include methods for testing such compounds in cellular assays. The compounds illustrated in the examples are not, however, to be construed as forming the only genus that is considered as the disclosure.

[0240] The examples further illustrate details for the preparation of the compounds of the present disclosure. Those skilled in the art will readily understand that known variations of the conditions and processes of the following preparative procedures can be used to prepare these compounds. For instance, in some cases, the order of carrying out the steps of reaction schemes may be varied to facilitate the reaction or to avoid unwanted reaction products. Starting materials and intermediates for the final compounds are purchased, made from known procedures, or as otherwise illustrated. The examples are provided for the purpose of further illustration only and are not intended to be limitations on the disclosure.

[0241] NMR data were obtained on a 300 MHz or 400 MHz instrument in CDC₃, DMSO-d₆, or Methanol-d₄ with the chemical shifts reported relative to tetramethylsilane standard. Resonance signals are reported by the following abbreviations: s=singlet, d=doublet, t=triplet, q=quartet, dd=doublet of doublets, m=multiplet or overlap of nonequivalent resonances. Coupling constants (J) are reported in Hertz (Hz).

[0242] Throughout the synthetic schemes and examples, abbreviations and acronyms may be used with the following meanings unless otherwise indicated:

Abbreviations

| Abbreviation | Definition |
|---|---|
| 3AzaPhe4AcPip | (S)-3-(6-(4-Acetylpiperazin-1-yl)pyridin-3-yl)-2- |
| | aminopropanoic acid |
| 3Pal | (2S)-2-amino-3-(3-pyridyl)propanoic acid |
| 3Pal4Ph4CO2H | 4-[5-[(2S)-2-amino-2-carboxy-ethyl]-2-pyridyl]benzoic acid |
| 3Pal4Ph4CO2H | (S)-4-(5-(2-amino-2-carboxyethyl)pyridin-2-yl)benzoic acid |
| 4CzIPN | 1,2,3,5-Tetrakis(carbazol-9-yl)-4,6-dicyanobenzene |
| 4Pal | (2S)-2-amino-3-(4-pyridyl)propanoic acid |
| 4PyridaAla | (2S)-2-amino-3-pyridazin-4-yl-propanoic acid |
| A | 1-Alanine |
| AA | Amino acid |
| Ac | Acetyl |
| ACN or MeCN | Acetonitrile |
| AcOH | Acetic acid |
| AEF | (S)-2-amino-3-(4-(2-aminoethoxy)phenyl)propanoic acid |
| AEFC4AcidNMe3 | (S)-4-((2-(4-(2-amino-2-carboxyethyl)phenoxy)ethyl)amino)- |
| | N,N,N-trimethyl-4-oxobutan-1-aminium |
| AEFC6AcidNMe3 | (S)-6-((2-(4-(2-amino-2-carboxyethyl)phenoxy)ethyl)amino)- |
| | N,N,N-trimethyl-6-oxohexan-1-aminium |
| AEFNMe3 | (S)-2-(4-(2-amino-2-carboxyethyl)phenoxy)-N,N,N- |
| | trimethylethan-1-aminium |
| AEFPEG1AcidNMe3 | (S)-2-(3-((2-(4-(2-amino-2- |
| | carboxyethyl)phenoxy)ethyl)amino)-3-oxopropoxy)-N,N,N- |
| | trimethylethan-1-aminium |
| AEFPEG2acidNMe3 | (S)-2-(2-(3-((2-(4-(2-amino-2- |
| | carboxyethyl)phenoxy)ethyl)amino)-3-oxopropoxy)ethoxy)- |
| | N,N,N-trimethylethan-1-aminium |
| Ala2Oxad1345Me | (S)-2-Amino-3-(5-methyl-1,2,4-oxadiazol-3-yl)propanoic |
| | acid |
| Ala3Oxad1245Me | (S)-2-Amino-3-(5-(methoxymethyl)-1,2,4-oxadiazol-3- |
| | yl)propanoic acid |
| Ala3Oxad1245MeOMe | (S)-2-Amino-3-(5-(methoxymethyl)-1,2,4-oxadiazol-3- |
| | yl)propanoic acid |
| AlaPent | (2S)-2-amino-3-(1-bicyclo[1.1.1]pentanyl)propanoic acid |
| AlaTet5 | (S)-2-amino-3-(2H-tetrazol-5-yl)propanoic acid |
| AlaTHP4 | (S)-2-Amino-3-(tetrahydro-2H-pyran-4-yl)propanoic acid |
| ASCVD | Atherosclerotic cardiovascular disease |
| Asu | (S)-2-Aminooctanedioic acid |
| BCP3Ph4CO2H | (S)-4-(3-(2-Amino-2-carboxyethyl)bicyclo[1.1.1]pentan-1- |
| | yl)benzoic acid |
| Bip4CO2H | 4-[4-[(2S)-2-amino-2-carboxy-ethyl]phenyl]benzoic acid |
| Bip4CONH2 | (S)-2-Amino-3-(4′-carbamoyl-[1,1′-biphenyl]-4-yl)propanoic |
| | acid |
| Boc | tert-Butoxy-carbonyl |
| Boc₂O | Di-tert-butyl dicarbonate |
| CAN | Ammonium Cerium(IV) Nitrate |
| CANTOS | Canakinumab Anti-inflammatory Thrombosis Outcomes |
| | Study |
| Cbz | Benzyl carbamate |
| CDCl₃ | Deuterated chloroform |
| Cha | (S)-2-((((9H-Fluoren-9-yl)methoxy)carbonyl)amino)-3- |
| | cyclohexylpropanoic acid |
| Cit | (2S)-2-amino-5-ureido-pentanoic acid |
| COD | 1,5-Cyclooctadiene |
| CRP | C-reactive protein |
| Cy | Cyclohexane |
| D | 1-Aspartic acid |
| Dab | (2S)-2,4-diaminobutanoic acid |
| Dap | (S)-2-Amino-3-(carboxyamino)propanoic acid |
| dba | Dibenzylideneacetone |
| DCC | N,N′-dicyclohexylcarbodiimide |
| DCC | N,N′-Dicyclohexylcarbodiimide |
| DCE | Dichloroethane |
| DCM | Dichloromethane |
| DIC | N,N′-Diisopropylcarbodiimide |
| DIEA or DIPEA | N,N-Diisopropylethylamine or Hunig's base |
| DMA | N,N-dimethylacetamide |
| DMAP | 4-dimethylaminopyridine |
| DMF | N,N-dimethylformamide |
| DMSO | Dimethylsulfoxide |
| dNMeA | D-N-methyl-Alanine |
| dNMeD | N-Methyl-D-aspartic acid |
| dP | D-proline |
| dPip | (R)-piperidine-2-carboxylic acid |
| dProc4NH2 | (2R,4R)-4-aminopyrrolidine-2-carboxylic acid |
| dProt4F | (2R,4S)-4-Fluoropyrrolidine-2-carboxylic acid |
| dProt4NH2 | (2R,4S)-4-aminopyrrolidine-2-carboxylic acid |
| dProt4NH2C6acidNMe3 | 6-(((3S,5R)-5-carboxypyrrolidin-3-yl)amino)-N,N,N- |
| | trimethyl-6-oxohexan-1-aminium |
| dProt4NHPEG2acidNMe3 | 2-(2-(3-(((3S,5R)-5-carboxypyrrolidin-3-yl)amino)-3- |
| | oxopropoxy)ethoxy)-N,N,N-trimethylethan-1-aminium |
| dProt4NMe3 | (3S,5R)-5-Carboxy-N,N,N-trimethylpyrrolidin-3-aminium |
| dProt4OH | (2R,4S)-4-hydroxypyrrolidine-2-carboxylic acid |
| dtbbpy | 4,4′-di-tert-butyl-2,2′-dipyridyl |
| dtbpf | (di-tert-butylphosphino)ferrocene |
| E | 1-Glutamic acid |
| EA | ethyl acetate |
| EDCI | N-[3-(Methylamino)propyl]-N′-ethylcarbodiimide |
| | hydrochloride |
| ESI | electrospray ionization |
| EtOAc | Ethyl acetate |
| F | 1-Phenylalanine |
| F4SO2NH2 | (S)-2-Amino-3-(4-sulfamoylphenyl)propanoic acid |
| Fmoc | 9H-fluoren-9-ylmethoxycarbonyl |
| Fmoc-OSU | (9H-Fluoren-9-yl)methyl (2,5-dioxopyrrolidin-1-yl) carbonate |
| G | Glycine |
| h | hour |
| HATU | 1-[Bis(dimethylamino)methylene]-1H-1,2,3-triazolo[4,5- |
| | b]pyridinium 3-oxid hexafluorophosphate or N- |
| | [(Dimethylamino)-1H-1,2,3-triazolo-[4,5-b]pyridin-1- |
| | ylmethylene]-N-methylmethanaminium hexafluorophosphate |
| | N-oxide |
| hCha | (S)-2-Amino-4-cyclohexylbutanoic acid |
| HFIP | Hexafluoroisopropanol |
| HFpEF | Heart failure with preserved ejection fraction |
| HPLC | High-performance liquid chromatography |
| hS | 1-homoserine |
| hsCRP | High sensitivity C-reactive protein |
| IPA | Isopropanol |
| K | 1-Lysine |
| K3CH3NPEG4 | (S)-21-Amino-21-carboxy-N,N,N-trimethyl-15-oxo-3,6,9,12- |
| | tetraoxa-16-azahenicosan-1-aminium |
| KPEG2acidNMe3 | (S)-2-(2-(3-((5-amino-5-carboxypentyl)amino)-3- |
| | oxopropoxy)ethoxy)-N,N,N-trimethylethan-1-aminium |
| LCMS | Liquid chromatography mass spectrometry |
| LDA | Lithium diisopropylamide |
| LDL | Low-density lipoprotein |
| LED | Light emitting diode |
| MACE | Major adverse cardiac events |
| MeOH | Methanol |
| min | Minute |
| mL | milliliter |
| MS | Mass spectrometry |
| N | L-Asparagine |
| NdM | N4,N4-dimethyl-L-asparagine |
| NIS | N-iodosuccinimide |
| NMO | N-Methylmorpholine N-oxide |
| NMP | N-Methyl-2-pyrrolidone |
| NMR | Nuclear magnetic resonance |
| NsCl | 4-Nitrobenzenesulfonyl chloride |
| Nva | (S)-2-Aminopentanoic acid |
| NvaOMe | (S)-2-amino-5-methoxypentanoic acid |
| o.n. | Over night |
| OMpe | β-methylpentyl ester |
| Orn | 1-Ornithine |
| OrnMe | (S)-2-amino-5-(methylamino)pentanoic acid |
| OrnMe3 | (S)-4-Amino-4-carboxy-N,N,N-trimethylbutan-1-aminium |
| OSu | O-succinimide |
| Oxyma | Ethyl cyano(hydroxyimino)acetate |
| P | L-Proline |
| Pbf | 2,2,4,6,7-pentamethyldihydrobenzofuran-5-sulfonyl |
| PDC | Pyridinium dichromate |
| PE | Petroleum ether |
| PfTrpB-7E6 | Engineered tryptophan synthase from Pyrococcus furiosus |
| Phe3CONH2 | (S)-2-Amino-3-(3-carbamoylphenyl)propanoic acid |
| Phe42Oxad1345Me | (S)-2-Amino-3-(4-(5-methyl-1,3,4-oxadiazol-2- |
| | yl)phenyl)propanoic acid |
| Phe43Oxad1245Me | (S)-2-Amino-3-(4-(5-methyl-1,2,4-oxadiazol-3- |
| | yl)phenyl)propanoic acid |
| Phe43Oxad1245MeOEt | (S)-2-Amino-3-(4-(5-(ethoxymethyl)-1,2,4-oxadiazol-3- |
| | yl)phenyl)propanoic acid |
| Phe4AcPip | (S)-3-(4-(4-Acetylpiperazin-1-yl)phenyl)-2-aminopropanoic |
| | acid |
| Phe4BR4 | (S)-2-amino-3-(4′-(methylsulfonamido)-[1,1′-biphenyl]-4- |
| | yl)propanoic acid |
| Phe4CONH2 | (S)-2-Amino-3-(4-carbamoylphenyl)propanoic acid |
| Phe4COOH | 4-[(2S)-2-amino-2-carboxy-ethyl]benzoic acid |
| Phe4pcCCA | (S)-2-Amino-3-(4-((1s,4R)-4-(tert- |
| | butoxycarbonyl)cyclohexyl)phenyl)propanoic acid |
| Phe4ptCCA | (S)-2-Amino-3-(4-((1r,4S)-4-(tert- |
| | butoxycarbonyl)cyclohexyl)phenyl)propanoic acid |
| PLP | 3-hydroxy-2-methyl-5-([phosphonooxy]methyl)-4- |
| | pyridinecarboxaldehyde or pyridoxal 5-phosphate |
| PPh₃ | Triphenylphosphine |
| Proc4F | (2S,4S)-4-Fluoropyrrolidine-2-carboxylic acid |
| Proc4OH | (2S,4S)-4-Hydroxypyrrolidine-2-carboxylic acid |
| Prot3Ph3F | (2S,3R)-3-(3-fluorophenyl)pyrrolidine-2-carboxylic acid |
| Prot4Bn3F4F | (2S,4R)-4-(3,4-difluorobenzyl)pyrrolidine-2-carboxylic acid |
| Prot4Bn4F | (2S,4R)-4-(4-fluorobenzyl)pyrrolidine-2-carboxylic acid |
| Prot4CH2Bip | (2S,4R)-4-([1,1′-biphenyl]-4-ylmethyl)pyrrolidine-2- |
| | carboxylic acid |
| Prot4CH2Pyrim | (2S,4R)-4-(pyrimidin-5-ylmethyl)pyrrolidine-2-carboxylic |
| | acid |
| Prot4F | (2S,4R)-4-Fluoropyrrolidine-2-carboxylic acid |
| Prot4NH2 | (2S,4R)-4-aminopyrrolidine-2-carboxylic acid |
| Prot4OH | (2S,4R)-4-Hydroxypyrrolidine-2-carboxylic acid |
| psi | Pound-force per square inch |
| Py | Pyridine |
| PyAOP | (7-Azabenzotriazol-1-yloxy)tripyrrolidinophosphonium |
| | hexafluorophosphate |
| Pyrim | (2S,4R)-4-(4-(pyrimidin-5-yl)benzyl) pyrrolidine-2- |
| | carboxylic acid |
| PyrimAla4Ph4CO2H | 4-[5-[(2S)-2-amino-2-carboxy-ethyl]pyrimidin-2-yl]benzoic |
| | acid |
| Q | 1-Glutamine |
| Qdm | N5,N5-Dimethyl-L-glutamine |
| R | 1-Arginine |
| RP | Reverse phase |
| rpm | Revolutions per minute |
| RT | Retention time |
| rt | Room temperature |
| S | 1-Serine |
| sbMe1Nal | (2S,3S)-2-amino-3-(1-naphthyl)butanoic acid |
| SbMe1Nal3Cl | (2S,3S)-2-Amino-3-(3-chloronaphthalen-1-yl)butanoic acid |
| SbMe1Nal3Me | (2S,3S)-2-Amino-3-(3-methylnaphthalen-1-yl)butanoic acid |
| SbMe1Nal3OMe | (2S,3S)-2-Amino-3-(3-methoxynaphthalen-1-yl)butanoic acid |
| SbMe1Nal8F | (2S,3S)-2-Amino-3-(3-methoxynaphthalen-1-yl)butanoic acid |
| SbMeW4Cl | (2S,3S)-2-amino-3-(4-chloro-1H-indol-3-yl)butanoic acid |
| SbMeW4F | (2S,3S)-2-amino-3-(4-fluoro-1H-indol-3-yl)butanoic acid |
| SerOMe | O-Methyl-L-serine |
| SFC | Supercritical fluid chromatography |
| SPPS | Solid-Phase Peptide Synthesis |
| Su | Succinimide |
| T | 1-threonine |
| TBAB | Tetrabutylammonium bromide |
| TBAF | Tetrabutylammonium fluoride |
| TBAI | Tetrabutylammonium iodide |
| tBu | tert-Butyl |
| t-BuOH | tert-Butanol |
| TEA | Triethylamine |
| TFA | Trifluoroacetic acid |
| THF | Tetrahydrofuran |
| TIS | Triisopropylsilane |
| TMSCl | Trimethylsilyl chloride |
| Trp2Me | (S)-2-Amino-3-(2-methyl-1H-indol-3-yl)propanoic acid |
| Trp6F | (S)-2-Amino-3-(6-fluoro-1H-indol-3-yl)propanoic acid |
| TyrEtNAc | (2S)-3-[4-(2-acetamidoethoxy)phenyl]-2-amino-propanoic |
| | acid |
| TyrOCOPyrr | (S)-2-Amino-3-(4-((pyrrolidine-1- |
| | carbonyl)oxy)phenyl)propanoic acid |
| UPLC | Ultra Performance Liquid Chromatography or Ultrahigh |
| | Pressure Liquid Chromatography |
| UV | ultraviolet |
| V | 1-valine |
| W | 1-Tryptophan |
| wt | weight |
| Y | 1-tyrosine |
| YFN | (S)-2-Amino-3-(4-(5-oxo-4,5-dihydro-1,2,4-oxadiazol-3- |
| | yl)phenyl)propanoic acid |

[0243] The following examples are meant to be illustrative and should not be construed as further limiting. The contents of the figures and all references, patents, and published patent applications cited throughout this application are expressly incorporated herein by reference.

### Intermediate Syntheses:

[chemical structure]

[chemical structure]

### (S)-4-((2-(4-(2-((((9H-fluoren-9-yl)methoxy)carbonyl)amino)-2-carboxyethyl)phenoxy)ethyl)amino)-N,N,N-trimethyl-4-oxobutan-1-aminium 2,2,2-trifluoroacetate

[0244] Step 1: To a stirred solution of tert-butyl 4-bromobutanoate (3 g, 13.45 mmol) and trimethylamine hydrochloride (10.28 g, 108 mmol) in EtOH (60 mL) was added NaHCO₃ (12.44 g, 148 mmol) at room temperature. The mixture was stirred at 50° C. for 16 h. The mixture was cooled to room temperature and the solid was filtered out. The filtrate was concentrated under reduced pressure and the residue was suspended in DCM (30 mL). The solid was filtered out and the filtrate was concentrated under reduced pressure to give 4-(tert-butoxy)-N,N,N-trimethyl-4-oxobutan-1-aminium (2 g, 7.91 mmol, 58.8% yield) as a colorless oil. MS ESI calculated for C₁₁H₂₄NO₂⁺ [M]⁺ 202.18, found 202.20.

[0245] Step 2: To a stirred solution of 4-(tert-butoxy)-N,N,N-trimethyl-4-oxobutan-1-aminium (2 g, 9.89 mmol) in 4 N HCl in dioxane (50 mL) was stirred at 25° C. for 2 h. The solvent was concentrated under reduced pressure to give 3-carboxy-N,N,N-trimethylpropan-1-aminium chloride (1.3 g, 8.89 mmol, 90% yield) as an off-white solid. MS ESI calculated for C₇H₁₆NO₂⁺ [M-Cl]⁺ 146.12, found 146.15.

[0246] Step 3: To a stirred solution of tert-butyl (S)-3-(4-(2-aminoethoxy)phenyl)-2-((tert-butoxycarbonyl)amino)propanoate (5 g, 13.14 mmol) in DMF were added 3-carboxy-N,N,N-trimethylpropan-1-aminium chloride (5.76 g, 39.4 mmol) and DIEA (8.49 g, 65.7 mmol) at room temperature. The solution was stirred at 0° C. for 10 min. HATU (6.00 g, 15.77 mmol) was added to the solution and the solution was stirred at 0° C. for 2 h. The solution was purified by RP-flash with the following conditions: C¹⁸ column, 330 g, 1%-1% in 5 min, 1%-40% in 25 min, MeCN in water (0.05% TFA) to give (S)-4-((2-(4-(3-(tert-butoxy)-2-((tert-butoxycarbonyl)amino)-3-oxopropyl)phenoxy)ethyl)amino)-N,N,N-trimethyl-4-oxobutan-1-aminium as an off-white solid. MS ESI calculated for C₂₇H₄₆N₃O₆ [M-CF₃COO]⁺ 508.34, found 508.25.

[0247] Step 4: To a stirred solution of (S)-4-((2-(4-(3-(tert-butoxy)-2-((tert-butoxycarbonyl)amino)-3-oxopropyl)phenoxy)ethyl)amino)-N,N,N-trimethyl-4-oxobutan-1-aminium 2,2,2-trifluoroacetate (6.4 g, 10.29 mmol) in DCM (80 mL) was added TFA (120 mL) at room temperature. The solution was stirred at room temperature for 3 h. The solvent was concentrated under reduced pressure to give (S)-4-((2-(4-(2-amino-2-carboxyethyl)phenoxy)ethyl)amino)-N,N,N-trimethyl-4-oxobutan-1-aminium 2,2,2-trifluoroacetate (4.7 g, 10.10 mmol, 98% yield) as a yellow oil. MS ESI calculated for C₁₈H₃₀N₃O₄ [M-CF₃COO]⁺ 352.22, found 352.10.

[0248] Step 5: To a mixture of (S)-4-((2-(4-(2-amino-2-carboxyethyl)phenoxy)ethyl)amino)-N,N,N-trimethyl-4-oxobutan-1-aminium 2,2,2-trifluoroacetate (6.4 g, 13.75 mmol) in THF (60 mL) and water (60 mL) were added NaHCO₃ (5.78 g, 68.7 mmol) and Fmoc-OSu (4.64 g, 13.75 mmol) at 25° C. The mixture was stirred at 25° C. for 2 h. The pH value of the reaction mixture was adjusted to 3 with 1 N HCl. The mixture was concentrated under reduced pressure. The residue was purified by RP-flash with the following conditions: C¹⁸ column, 330 g, 1%-1% in 5 min, 1%-50% in 30 min, MeCN in water (0.05% TFA) to give (S)-4-((2-(4-(2-((((9H-fluoren-9-yl)methoxy)carbonyl)amino)-2-carboxyethyl)phenoxy)ethyl)amino)-N,N,N-trimethyl-4-oxobutan-1-aminium 2,2,2-trifluoroacetate (4.7434 g, 6.55 mmol, 47.7% yield) as a light yellow semi-solid. MS ESI calculated for C₃₃H₄₀N₃O₆ [M-CF₃COO]⁺ 574.29, found 574.15. ¹H NMR (300 MHz, CD₃OD) δ 7.76-7.74 (m, 2H), 7.59-7.56 (m, 2H), 7.40-7.35 (m, 2H), 7.31-7.26 (m, 2H), 7.16-7.14 (m, 2H), 6.84-6.81 (m, 2H), 4.38-4.12 (m, 4H), 3.98-3.95 (m, 2H), 3.52 (t, J=5.4 Hz, 2H), 3.32-3.24 (m, 2H), 3.13-3.03 (m, 10H), 2.91-2.85 (m, 1H), 2.30 (t, J=6.9 Hz, 2H), 2.05-1.99 (m, 2H).

[chemical structure]

### (S)-6-((2-(4-(2-((((9H-fluoren-9-yl)methoxy)carbonyl)amino)-2-carboxyethyl)phenoxy)ethyl)amino)-N,N,N-trimethyl-6-oxohexan-1-aminium trifluoroacetate

[0249] Step 1: To a stirred mixture of 6-(dimethylamino)hexanoic acid (2 g, 12.56 mmol) in DCM (20 mL) was added N,N-dimethylformamide (0.092 g, 1.256 mmol) at 25° C., then the solution of oxalyl dichloride (4.78 g, 37.7 mmol) in DCM (10 mL) was added at 0° C. The resulting mixture was stirred for 1 h at 30° C. The reaction mixture was concentrated under reduced pressure to give crude 6-(dimethylamino)hexanoyl chloride (2.232 g, 12.56 mmol, 100% yield) as a yellow oil, which was dissolved in DCM (7 mL). TEA (5.78 g, 57.1 mmol) and the solution of 6-(dimethylamino)hexanoyl chloride (2.232 g, 12.56 mmol) in DCM (7 mL) were added to the stirred mixture of tert-butyl (S)-3-(4-(2-aminoethoxy)phenyl)-2-((tert-butoxycarbonyl)amino)propanoate (4.34 g, 11.42 mmol) in DCM (13 mL) at 0° C. After the resulting mixture was stirred for 2 h at 25° C., it was concentrated under reduced pressure. The residue was purified by silica gel column chromatography, eluted with 0-30% MeOH (1% NH₄OH) in DCM and the product-containing fractions were collected and evaporated in vacuo to afford tert-butyl (S)-2-((tert-butoxycarbonyl)amino)-3-(4-(2-(6-(dimethylamino)hexanamido)ethoxy)phenyl)propanoate (1.7 g, 3.26 mmol, 29% yield) as a light white solid. MS ESI calculated for C₂₈H₄₈N₃O₆ [M+H]⁺ 522.35, found 522.30.

[0250] Step 2: To a stirred mixture of tert-butyl (S)-2-((tert-butoxycarbonyl)amino)-3-(4-(2-(6-(dimethylamino)hexanamido)ethoxy)phenyl)propanoate (1.7 g, 3.26 mmol) in MeCN (17 mL) were added NaHCO₃ (2.74 g, 32.6 mmol) and Mel (1.019 mL, 16.29 mmol) at 25° C. The resulting mixture was stirred for 16 h at 25° C. The solid was filtered out and the filtrate was concentrated under reduced pressure to give crude (S)-6-((2-(4-(3-(tert-butoxy)-2-((tert-butoxycarbonyl)amino)-3-oxopropyl)phenoxy)ethyl)amino)-N,N,N-trimethyl-6-oxohexan-1-aminium iodide (2.163 g, 3.26 mmol, 100% yield) as a yellow oil. MS ESI calculated for C₂₉H₅₀IN₃O₆[M-I]⁺ 536.37, found 536.35.

[0251] Step 3: To a stirred mixture of (S)-6-((2-(4-(3-(tert-butoxy)-2-((tert-butoxycarbonyl)amino)-3-oxopropyl)phenoxy)ethyl)amino)-N,N,N-trimethyl-6-oxohexan-1-aminium iodide (2.163 g, 3.26 mmol) in DCM (10 mL) was added TFA (10 mL, 130 mmol) at 25° C. After the resulting mixture was stirred for 2 h at 25° C., it was concentrated under reduced pressure to give crude (S)-6-((2-(4-(2-amino-2-carboxyethyl)phenoxy)ethyl)amino)-N,N,N-trimethyl-6-oxohexan-1-aminium 2,2,2-trifluoroacetate (1.609 g, 3.26 mmol, 100% yield) as a yellow oil. MS ESI calculated for C₂₂H₃₄F₃N₃O₆[M-CF₃COO]⁺ 380.25, found 380.15.

[0252] Step 4: To a solution of (S)-6-((2-(4-(2-amino-2-carboxyethyl)phenoxy)ethyl)amino)-N,N,N-trimethyl-6-oxohexan-1-aminium 2,2,2-trifluoroacetate (1.609 g, 3.26 mmol) in THF (8 mL) and water (8 mL) were added NaHCO₃ (1.369 g, 16.30 mmol) and Fmoc-Osu (1.002 g, 2.93 mmol) at 25° C. The resulting mixture was stirred at room temperature for 16 h, then the pH was adjusted to 3 with 1 M HCl. The resulting mixture was purified by RP-flash with the following conditions: C¹⁸ column (120 g); Mobile Phase A: water (0.1% TFA), Mobile Phase B: ACN; (Gradient: 5% B hold 5 min, up to 38% B within 30 min, 38% B hold 2.6 min; up to 95% B within 2 min, 95% B hold 5 min); Flow rate: 60 mL/min; Detector: UV 210 nm; RT=31 min. The product-containing fractions were collected and evaporated in vacuo to give (S)-6-((2-(4-(2-((((9H-fluoren-9-yl)methoxy)carbonyl)amino)-2-carboxyethyl)phenoxy)ethyl)amino)-N,N,N-trimethyl-6-oxohexan-1-aminium trifluoroacetate (1.12 g, 1.591 mmol, 49% yield) as a white solid. MS ESI calculated for C₃₇H₄₄F₃N₃O₈ [M-CF₃COO]⁺ 602.32, found 602.25. ¹H NMR (400 MHz, CD₃OD) δ 7.78 (d, J=7.6 Hz, 2H), 7.61-7.57 (m, 2H), 7.41-7.39 (m, 2H), 7.37-7.28 (m, 2H), 7.17-7.14 (m, 2H), 6.84-6.82 (m, 2H), 4.35-4.14 (m, 4H), 3.97-3.95 (m, 2H), 3.53-3.50 (m, 2H), 3.31-3.04 (m, 12H), 2.88-2.86 (m, 1H), 2.24-2.20 (m, 2H), 1.75-1.63 (m, 4H), 1.34-1.32 (m, 2H). ¹⁹F NMR (376 MHz, CD₃OD) δ −77.401.

[chemical structure]

### (S)-2-(4-(2-((((9H-fluoren-9-yl)methoxy)carbonyl)amino)-2-carboxyethyl)phenoxy)-N,N,N-trimethylethan-1-aminium chloride

[0253] Step 1: To a stirred solution of tert-butyl (S)-3-(4-(2-aminoethoxy)phenyl)-2-((tert-butoxycarbonyl)amino)propanoate (7.5 g, 17.74 mmol) in MeOH (100 mL) were added Mel (12.59 g, 89 mmol) and NaHCO₃ (7.45 g, 89 mmol) at room temperature. The mixture was stirred at 40° C. for 16 h then cooled to room temperature. The solid was filtered out and the filtrate was concentrated under reduced pressure to give (S)-2-(4-(3-(tert-butoxy)-2-((tert-butoxycarbonyl)amino)-3-oxopropyl)phenoxy)-N,N,N-trimethylethan-1-aminium iodide (10 g, 16.35 mmol, 92% yield) as a light yellow solid. MS ESI calculated for C₂₃H₃₉N₂O₅ [M-I]⁺ 423.29, found 423.15.

[0254] Step 2: To a stirred solution of (S)-2-(4-(3-(tert-butoxy)-2-((tert-butoxycarbonyl)amino)-3-oxopropyl)phenoxy)-N,N,N-trimethylethan-1-aminium iodide (10 g, 18.17 mmol) in DCM (20 mL) was added TFA (40 mL) at room temperature. The resulting solution was stirred at 25° C. for 2 h. The solvent was concentrated under reduced pressure to give (S)-2-(4-(2-amino-2-carboxyethyl)phenoxy)-N,N,N-trimethylethan-1-aminium 2,2,2-trifluoroacetate (7 g, 14.72 mmol, 81% yield) as a yellow solid. MS ESI calculated for C₁₄H₂₃N₂O₃ [M-CF₃COO]⁺ 267.17, found 267.05.

[0255] Step 3: To a stirred solution of (S)-2-(4-(2-amino-2-carboxyethyl)phenoxy)-N,N,N-trimethylethan-1-aminium 2,2,2-trifluoroacetate (8 g, 21.03 mmol) in THF (80 mL) and water (80 mL) were added Fmoc-OSu (7.09 g, 21.03 mmol) and NaHCO₃ (5.30 g, 63.1 mmol) at room temperature. The resulting solution was stirred at 25° C. for 16 h. The pH of the solution was adjusted to 3 with 6 N HCl. The solvent was concentrated under reduced pressure and the residue was purified by RP flash with the following conditions: 330 g C¹⁸ column, 2%-2% in 5 min, 2%-40% in 30 min, 98%-98% in 5 min, MeCN in water (2 mmol HCl), RT=35 min to give (S)-2-(4-(2-((((9H-fluoren-9-yl)methoxy)carbonyl)amino)-2-carboxyethyl)phenoxy)-N,N,N-trimethylethan-1-aminium chloride (5.3489 g, 9.98 mmol, 47.5% yield) as an off-white solid. MS ESI calculated for C₂₉H₃₃N₂O₅ [M-Cl]⁺ 489.24, found 489.25. ¹H NMR (300 MHz, DMSO-d₆) δ 12.85 (br, 1H), 7.89 (d, J=7.5 Hz, 2H), 7.74-7.71 (m, 3H), 7.67-7.65 (m, 2H), 7.44-7.24 (m, 4H), 6.91 (d, J=7.5 Hz, 2H), 4.41-4.40 (m, 2H), 4.24-4.10 (m, 4H), 3.79-3.76 (m, 2H), 3.17 (s, 9H), 3.08-3.06 (m, 1H), 2.86-2.78 (m, 1H).

[chemical structure]

### (S)-2-(3-((2-(4-(2-((((9H-fluoren-9-yl)methoxy)carbonyl)amino)-2-carboxyethyl)phenoxy)ethyl)amino)-3-oxopropoxy)-N,N,N-trimethylethan-1-aminium 2,2,2-trifluoroacetate

[0256] Step 1: To a stirred solution of tert-butyl 3-(2-bromoethoxy)propanoate (2.5 g, 9.88 mmol) and trimethylamine hydrochloride (9.44 g, 99 mmol) in EtOH (30 mL) was added NaHCO₃ (12.44 g, 148 mmol) at room temperature. The mixture was stirred at 50° C. for 16 h then cooled to room temperature and the solid was filtered out. The filtrate was concentrated under reduced pressure and the residue was suspended in DCM (30 mL). The solid was filtered out and the filtrate was concentrated under reduced pressure to give 2-(3-(tert-butoxy)-3-oxopropoxy)-N,N,N-trimethylethan-1-aminium (4.2 g, 9.04 mmol, 92% yield) as a colorless oil. MS ESI calculated for C₁₂H₂₆NO₃ [M]⁺ 232.19, found 232.10.

[0257] Step 2: The solution of 2-(3-(tert-butoxy)-3-oxopropoxy)-N,N,N-trimethylethan-1-aminium (4.2 g, 9.04 mmol) in 4 N HC/dioxane (50 mL) was stirred at 25° C. for 2 h. The solvent was concentrated under reduced pressure to give 2-(2-carboxyethoxy)-N,N,N-trimethylethan-1-aminium chloride (3.8 g, 7.18 mmol, 79% yield) as an off-white solid. MS ESI calculated for C₈H₁₈NO₃ [M-Cl]⁺ 176.13, found 176.15.

[0258] Step 3: To a stirred solution of 2-(2-carboxyethoxy)-N,N,N-trimethylethan-1-aminium chloride (5.01 g, 9.46 mmol) and DIEA (6.89 mL, 39.4 mmol) in DMF (40 mL) was added HATU (3.60 g, 9.46 mmol) at room temperature. The solution was stirred at 25° C. for 10 min. Tert-butyl (S)-3-(4-(2-aminoethoxy)phenyl)-2-((tert-butoxycarbonyl)amino)propanoate (3 g, 7.88 mmol) was added and the resulting solution was stirred at room temperature for 2 h. After concentrated under reduced pressure, the residue was purified by RP-flash with the following conditions: C¹⁸ column, 330 g, 1%-1% in 5 min, 1%-37% in 25 min, MeCN in water (0.05%) to give (S)-2-(3-((2-(4-(3-(tert-butoxy)-2-((tert-butoxycarbonyl)amino)-3-oxopropyl)phenoxy)ethyl)amino)-3-oxopropoxy)-N,N,N-trimethylethan-1-aminium 2,2,2-trifluoroacetate (5 g, 7.29 mmol, 92% yield) as a light yellow solid. MS ESI calculated for C₂₈H₄₈N₃O₇ [M-CF₃COO]⁺ 538.35, found 538.25.

[0259] Step 4: To a stirred solution of (S)-2-(3-((2-(4-(3-(tert-butoxy)-2-((tert-butoxycarbonyl)amino)-3-oxopropyl)phenoxy)ethyl)amino)-3-oxopropoxy)-N,N,N-trimethylethan-1-aminium 2,2,2-trifluoroacetate (5 g, 7.29 mmol) in DCM (10 mL) was added TFA (40 mL) at room temperature. The resulting solution was stirred at room temperature for 3 h. The solvent was concentrated under reduced pressure to give (S)-2-(3-((2-(4-(2-amino-2-carboxyethyl)phenoxy)ethyl)amino)-3-oxopropoxy)-N,N,N-trimethylethan-1-aminium 2,2,2-trifluoroacetate (3.7 g, 6.72 mmol, 92% yield) as a yellow oil. MS ESI calculated for C₁₉H₃₂N₃O₅ [M-CF₃COO]⁺ 382.23, found 382.15.

[0260] Step 5: To a stirred solution of (S)-2-(3-((2-(4-(2-amino-2-carboxyethyl)phenoxy)ethyl)amino)-3-oxopropoxy)-N,N,N-trimethylethan-1-aminium 2,2,2-trifluoroacetate (3.7 g, 6.72 mmol) and Na₂CO₃ (2.137 g, 20.16 mmol) in THF (50 mL) and water (50 mL) was added Fmoc-OSu (2.267 g, 6.72 mmol) at room temperature. The resulting mixture was stirred at 25° C. for 16 h. The pH was adjusted to 3 with 1 N HCl and the solution was purified by RP-flash with the following conditions: C¹⁸ column, 330 g, 1%-1% in 5 min, 1%-37% in 30 min, MeCN in water (0.05% TFA) to give (S)-2-(3-((2-(4-(2-((((9H-fluoren-9-yl)methoxy)carbonyl)amino)-2-carboxyethyl)phenoxy)ethyl)amino)-3-oxopropoxy)-N,N,N-trimethylethan-1-aminium 2,2,2-trifluoroacetate (4.8452 g, 6.62 mmol, 98% yield) as an off-white solid. MS ESI calculated for C₃₄H₄₂N₃O₇ [M-CF₃COO]⁺ 604.30, found 604.25. ¹H NMR (400 MHz, DMSO-d₆) δ 8.19 (s, 1H), 7.90-7.88 (m, 2H), 7.74-7.72 (m, 3H), 7.44-7.40 (m, 2H), 7.34-7.32 (m, 2H), 7.30-7.28 (m, 2H), 7.20-7.18 (m, 2H), 4.23-4.12 (m, 4H), 3.94-3.91 (m, 2H), 3.78-3.77 (m, 2H), 3.68-3.65 (m, 2H), 3.49-3.47 (m, 2H), 3.41-3.39 (m, 2H), 3.04 (s, 9H), 3.00-2.99 (m, 1H), 2.83-2.81 (m, 1H), 2.38 (t, J=6.0 Hz, 2H). ¹⁹F NMR (376 MHz, DMSO-d₆) δ −74.41.

[chemical structure]

### 6-(((3S,5R)-1-(((9H-fluoren-9-yl)methoxy)carbonyl)-5-carboxypyrrolidin-3-yl)amino)-N,N,N-trimethyl-6-oxohexan-1-aminium 2,2,2-trifluoroacetate

[0261] Step 1: TEA (9.54 g, 94 mmol) and the solution of 6-(dimethylamino)hexanoyl chloride (3.35 g, 18.85 mmol) in DCM (7 mL) were added to the stirred mixture of 1-(tert-butyl) 2-methyl (2R,4S)-4-aminopyrrolidine-1,2-dicarboxylate (4.61 g, 18.85 mmol) in DCM (13 mL) at 0° C. After stirring for 2 h at 25° C., the reaction mixture was concentrated under reduced pressure. The residue was purified by silica gel column chromatography, eluted with 0-30% MeOH (1% NH₄OH) in DCM. The product-containing fractions were collected and evaporated in vacuum to afford 1-(tert-butyl) 2-methyl (2R,4S)-4-(6-(dimethylamino)hexanamido)pyrrolidine-1,2-dicarboxylate (2.4 g, 4.98 mmol, 26% yield) as a light white solid. MS ESI calculated for C₁₉H₃₆N₃O₅ [M+H]⁺ 386.26, found 386.35.

[0262] Step 2: To a stirred mixture of 1-(tert-butyl) 2-methyl (2R,4S)-4-(6-(dimethylamino)hexanamido)pyrrolidine-1,2-dicarboxylate (2.4 g, 6.23 mmol) and NaHCO₃ (7.84 g, 93 mmol) in ACN (50 mL) was added Mel (8.84 g, 62.3 mmol) at room temperature. After stirring at 25° C. for 16 h, the solid was filtered out and the filtrate was concentrated under reduced pressure to give 6-(((3S,5R)-1-(tert-butoxycarbonyl)-5-(methoxycarbonyl)pyrrolidin-3-yl)amino)-N,N,N-trimethyl-6-oxohexan-1-aminium iodide (3.28 g, 5.60 mmol, 90% yield) as a light yellow solid. MS ESI calculated for C₂₀H₃₈IN₃O₅[M-I]⁺ 400.28, found 400.35.

[0263] Step 3: To a stirred solution of 6-(((3S,5R)-1-(tert-butoxycarbonyl)-5-(methoxycarbonyl)pyrrolidin-3-yl)amino)-N,N,N-trimethyl-6-oxohexan-1-aminium iodide (3.28 g, 5.60 mmol) in THF (50 mL) was added LiOH (16.79 mL, 16.79 mmol, 1 N in water) at room temperature. After stirring at 25° C. for 1 h, the pH was adjusted to 6 with 1 N HCl. The solvent was concentrated under reduced pressure to give 6-(((3S,5R)-1-(tert-butoxycarbonyl)-5-carboxypyrrolidin-3-yl)amino)-N,N,N-trimethyl-6-oxohexan-1-aminium chloride (2.36 g, 5.03 mmol, 90% yield) as a yellow solid. MS ESI calculated for C₁₉H₃₆ClN₃O₅[M-Cl]⁺ 386.26, found 386.35.

[0264] Step 4: To a stirred solution of 6-(((3S,5R)-1-(tert-butoxycarbonyl)-5-carboxypyrrolidin-3-yl)amino)-N,N,N-trimethyl-6-oxohexan-1-aminium chloride (2.36 g, 5.03 mmol) in DCM (50 mL) was added TFA (50 mL) at room temperature. The resulting mixture was stirred at 25° C. for 1 h, then concentrated under reduced pressure to give 6-(((3S,5R)-5-carboxypyrrolidin-3-yl)amino)-N,N,N-trimethyl-6-oxohexan-1-aminium 2,2,2-trifluoroacetate (2.01 g, 4.53 mmol, 90% yield) as a yellow solid. MS ESI calculated for C₁₆H₂₈F₃N₃O₅[M—CF₃COO]⁺ 286.21, found 286.15.

[0265] Step 5: To a stirred solution of 6-(((3S,5R)-5-carboxypyrrolidin-3-yl)amino)-N,N,N-trimethyl-6-oxohexan-1-aminium 2,2,2-trifluoroacetate (2.01 g, 5.03 mmol) and NaHCO₃ (1.268 g, 15.10 mmol) in THF (50 mL) and water (50 mL) was added Fmoc-OSu (1.698 g, 5.03 mmol) at room temperature. After stirring at 25° C. for 16 h, the pH was adjusted to 3 with 1 N HCl and the solvent was evaporated under reduced pressure. The residue was dissolved in THF/MeOH (1:1, 50 mL), the solid was filtered out and the filtrated was purified by RP-flash with the following conditions: C¹⁸ column, 330 g, 2%-2% in 8 min, 2%-35% in 30 min, 35%-95% in 10 min, 95%-95% in 8 min, MeCN in water (0.05% TFA) to give 6-(((3S,5R)-1-(((9H-fluoren-9-yl)methoxy)carbonyl)-5-carboxypyrrolidin-3-yl)amino)-N,N,N-trimethyl-6-oxohexan-1-aminium 2,2,2-trifluoroacetate (2.85 g, 4.49 mmol, 89% yield) as a light yellow solid. MS ESI calculated for C₃₁H₃₈F₃N₃O₇[M-CF₃COO]⁺ 508.28, found 508.25. ¹H NMR (300 MHz, DMSO-d₆) δ 8.20 (d, J=6.9 Hz, 1H), 7.93-7.90 (m, 2H), 7.69-7.63 (m, 2H), 7.47-7.41 (m, 2H), 7.36-7.31 (m, 2H), 4.32-4.15 (m, 5H), 3.68-3.55 (m, 1H), 3.29-3.22 (m, 3H), 3.03 (s, 9H), 2.19-2.08 (m, 4H), 1.69-1.53 (m, 4H), 1.27-1.22 (m, 2H). ¹⁹F-NMR (282 MHz, DMSO-d₆) δ 74.261.

[chemical structure]

### 2-(2-(3-(((3S,5R)-1-(((9H-fluoren-9-yl)methoxy)carbonyl)-5-carboxypyrrolidin-3-yl)amino)-3-oxopropoxy)ethoxy)-N,N,N-trimethylethan-1-aminium 2,2,2-trifluoroacetate

[0266] Step 1: To a stirred solution of 2-(2-(2-carboxyethoxy)ethoxy)-N,N,N-trimethylethan-1-aminium chloride (2.64 g, 10.32 mmol) in DMF (40 mL) were added DIEA (1.501 mL, 8.60 mmol) and HATU (3.27 g, 8.60 mmol) at 0° C. under nitrogen atmosphere. The resulting solution was stirred at 0° C. for 10 min. then 1-(tert-butyl) 2-methyl (2R,4S)-4-aminopyrrolidine-1,2-dicarboxylate (2.1 g, 8.60 mmol) was added and stirred at 25° C. for 1 h. The solution was purified by RP-flash with the following conditions: C¹⁸ column, 330 g, 2%-2% in 5 min, 2%-30% in 20 min, 98%-98% in 5 min, MeCN in water (0.05% TFA), RT=35 min to give 2,2,2-trifluoroacetic acid, 2-(2-(3-(((3S,5R)-1-(tert-butoxycarbonyl)-5-(methoxycarbonyl)pyrrolidin-3-yl)amino)-3-oxopropoxy)ethoxy)-N,N,N-trimethylethan-1-aminium salt (4.4 g, 7.46 mmol, 87% yield) as a light-yellow oil. MS ESI calculated for C₂₁H₄₀N₃O₇ [M-CF₃COO]⁺ 446.29, found 446.35.

[0267] Step 2: To a stirred solution of 2,2,2-trifluoroacetic acid, 2-(2-(3-(((3S,5R)-1-(tert-butoxycarbonyl)-5-(methoxycarbonyl)pyrrolidin-3-yl)amino)-3-oxopropoxy)ethoxy)-N,N,N-trimethylethan-1-aminium salt (4.4 g, 7.85 mmol) in THF (50 mL) was added LiOH (23.55 mL, 23.55 mmol, 1 N in water) at room temperature. The resulting solution was stirred at 25° C. for 1 h. The pH was adjusted to 3 with 1 N HCl and the solvent was concentrated under reduced pressure to give 2-(2-(3-(((3S,5R)-1-(tert-butoxycarbonyl)-5-carboxypyrrolidin-3-yl)amino)-3-oxopropoxy)ethoxy)-N,N,N-trimethylethan-1-aminium chloride (3.7 g, 7.12 mmol, 91% yield) as a yellow oil. MS ESI calculated for C₂₀H₃₈N₃O₇ [M-Cl]⁺ 432.27, found 432.35.

[0268] Step 3: To a stirred solution of 2-(2-(3-(((3S,5R)-1-(tert-butoxycarbonyl)-5-carboxypyrrolidin-3-yl)amino)-3-oxopropoxy)ethoxy)-N,N,N-trimethylethan-1-aminium chloride (3.7 g, 7.12 mmol) in DCM (60 mL) was added TFA (20 mL) at room temperature. The solution was stirred at 25° C. for 1 h. The solvent was concentrated under reduced pressure to give 2-(2-(3-(((3S,5R)-5-carboxypyrrolidin-3-yl)amino)-3-oxopropoxy)ethoxy)-N,N,N-trimethylethan-1-aminium 2,2,2-trifluoroacetate (3.2 g, 6.47 mmol, 91% yield) as a yellow oil. MS ESI calculated for C₁₅H₃₀N₃O₅ [M-CF₃COO]⁺ 332.22, found 332.25.

[0269] Step 4: To a stirred solution of 2-(2-(3-(((3S,5R)-5-carboxypyrrolidin-3-yl)amino)-3-oxopropoxy)ethoxy)-N,N,N-trimethylethan-1-aminium 2,2,2-trifluoroacetate (3.8 g, 7.68 mmol) in THF (30 mL) and water (30 mL) were added Na₂CO₃ (2.441 g, 23.03 mmol) and Fmoc-OSu (2.59 g, 7.68 mmol) at room temperature. The resulting mixture was stirred at 25° C. for 16 h. The pH was adjusted to 3 with 6 N HCl and the solution was purified by RP-flash with the following conditions: 330 g C¹⁸ column, 2%-2% in 5 min, 2%-30% in 20 min, 98%-98% in 5 min, MeCN in water (0.05% TFA), RT=25 min to give 2-(2-(3-(((3S,5R)-1-(((9H-fluoren-9-yl)methoxy)carbonyl)-5-carboxypyrrolidin-3-yl)amino)-3-oxopropoxy)ethoxy)-N,N,N-trimethylethan-1-aminium 2,2,2-trifluoroacetate (4.1824 g, 6.14 mmol, 80% yield) as a colorless semi-solid. MS ESI calculated for C₃₀H₄₀N₃O₇ [M-CF₃COO]⁺ 554.29, found 554.20. ¹H NMR (400 MHz, DMSO-d₆) δ 8.24-8.23 (m, 1H), 7.92-7.89 (m, 2H), 7.68-7.64 (m, 2H), 7.45-7.32 (m, 4H), 4.48-4.23 (m, 4H), 4.16-4.15 (m, 1H), 3.83-3.82 (m, 2H), 3.67-3.51 (m, 9H), 3.27-3.25 (m, 1H), 3.09 (s, 9H), 2.36-2.32 (m, 2H), 2.20-2.11 (m, 2H).

[chemical structure]

### (2S,4R)-1-(((9H-fluoren-9-yl)methoxy)carbonyl)-4-(pyrimidin-5-ylmethyl)pyrrolidine-2-carboxylic acid

[0270] Step 1: The solution of 1-(tert-butyl) 2-methyl (S)-4-methylenepyrrolidine-1,2-dicarboxylate (2.41 g, 9.99 mmol) and 9-BBN (80 mL, 40.0 mmol, 0.5 N in THF) was stirred at 40° C. for 1 h. The solution was cooled to room temperature and used to the next step directly. MS ESI calculated for C₁₂H₂₁BNO₆ [M-C₈H₁₄+H₂O₂—H]⁻ 286.15, found 286.25.

[0271] Step 2: To the solution of 1-(tert-butyl) 2-methyl (2S)-4-(((1R,5R)-9-borabicyclo[3.3.1]nonan-9-yl)methyl)pyrrolidine-1,2-dicarboxylate (14.5 g, 31.9 mmol) in THF (320 mL) was added K₃PO₄ (96 mL, 96 mmol, 1 N in water) at room temperature. The solution was stirred at room temperature for 20 min. 5-Bromopyrimidine (5.08 g, 31.9 mmol) and PdCl₂(dtbpf) (2.081 g, 3.19 mmol) were added and the resulting mixture was stirred at 60° C. for 1.5 h. The resulting solution was cooled to room temperature, diluted with brine (50 mL), extracted with EA (3×50 mL). The combined organic layer was washed with brine (2×25 mL), dried over anhydrous Na₂SO₄. After filtration, the filtrate was concentrated under reduced pressure and the residue was purified by a silica gel column chromatography, eluted with 0-90% EA in PE to afford a crude product. The crude product was separated by SFC with the following conditions: Column: Chiralpak IG, 3*25 cm, 5 m; Mobile Phase A: CO₂, Mobile Phase B: IPA:MeCN=1:1 (0.1% 2 M NH₃-MeOH); Flow rate: 100 mL/min; Gradient: isocratic 40% B; Column Temperature (° C.): 35; Back Pressure (bar): 100; Wavelength: 220 nm; RT1 (min): 8.93; RT2 (min): 11.32; Sample Solvent: MeOH (0.1% 2 M NH₃-MeOH); Injection Volume: 3.8 mL; Number of Runs: 5. The fractions at 8.93 min were collected and concentrated under reduced pressure to give 1-(tert-butyl) 2-methyl (2S,4R)-4-(pyrimidin-5-ylmethyl)pyrrolidine-1,2-dicarboxylate (4.3 g, 12.71 mmol, 40% yield) as a yellow oil. MS ESI calculated for C₁₆H₂₃N₃O₄ [M-Boc]⁺ 222.17, found 222.15. ¹H NMR (400 MHz, CDCl₃) δ 9.14 (d, J=4.7 Hz, 1H), 8.60 (s, 2H), 4.39-4.12 (m, 1H), 3.83-3.63 (m, 4H), 3.17-3.06 (m, 1H), 2.83-2.53 (m, 3H), 2.14-1.88 (m, 2H), 1.44-1.42 (m, 9H).

[0272] Step 3: To a stirred solution of 1-(tert-butyl) 2-methyl (2S,4R)-4-(pyrimidin-5-ylmethyl)pyrrolidine-1,2-dicarboxylate (4.3 g, 13.38 mmol) in THF (50 mL) was added LiOH (40.1 mL, 40.1 mmol, 1 N in water) at room temperature. The solution was stirred at 25° C. for 2 h. The pH of the solution was adjusted to 3 with 1 N HCl and the solvent was concentrated under reduced pressure to give (2S,4R)-1-(tert-butoxycarbonyl)-4-(pyrimidin-5-ylmethyl)pyrrolidine-2-carboxylic acid (4.1 g, 12.67 mmol, 95% yield) as a yellow solid. MS ESI calculated for C₁₅H₂₀N₃O₄ [M−H]⁻ 306.15, found 306.15.

[0273] Step 4: To a stirred solution of (2S,4R)-1-(tert-butoxycarbonyl)-4-(pyrimidin-5-ylmethyl)pyrrolidine-2-carboxylic acid (4.1 g, 12.67 mmol) in DCM (90 mL) was added TFA (30 mL) at room temperature. The solution was stirred at 25° C. for 1 h. The solvent was concentrated under reduced pressure to give (2S,4R)-4-(pyrimidin-5-ylmethyl)pyrrolidine-2-carboxylic acid (2.6 g, 11.29 mmol, 89% yield) as a yellow solid. MS ESI calculated for C₁₀H₁₄N₃O₂ [M+H]⁺ 208.10, found 208.15.

[0274] Step 5: To a stirred solution of (2S,4R)-4-(pyrimidin-5-ylmethyl)pyrrolidine-2-carboxylic acid (2.6 g, 12.55 mmol) in THF (50 mL) and water (50 mL) were added Fmoc-OSu (3.81 g, 11.29 mmol) and NaHCO₃ (5.27 g, 62.7 mmol) at room temperature. The resulting mixture was stirred at 25° C. for 16 h. The pH of the mixture was adjusted to 3 with 1 N HCl and the solution was purified by RP-flash with the following conditions: 330 g C¹⁸ column, 5%-5% in 5 min, 5%-40% in 25 min, 98%-98% in 5 min, MeCN in water (0.05% TFA), RT=30 min to give (2S,4R)-1-(((9H-fluoren-9-yl)methoxy)carbonyl)-4-(pyrimidin-5-ylmethyl)pyrrolidine-2-carboxylic acid (5.0 g, 11.53 mmol, 92% yield) as an off-white solid. MS ESI calculated for C₂₅H₂₄N₃O₄ [M+H]⁺ 430.17, found 430.10; ¹H NMR (300 MHz, CD₃OD) δ 9.18 (d, J=13.2 Hz, 1H), 8.68 (d, J=6.9 Hz, 2H), 7.80-7.75 (m, 2H), 7.61-7.58 (m, 2H), 7.41-7.27 (m, 4H), 4.42-4.31 (m, 3H), 4.23-4.17 (m, 1H), 3.62-3.50 (m, 1H), 3.18-3.00 (m, 1H), 2.76-2.70 (m, 2H), 2.68-2.66 (m, 1H), 2.12-2.02 (m, 2H).

[chemical structure]

### (2S,4R)-1-(((9H-fluoren-9-yl)methoxy)carbonyl)-4-(4-(pyrimidin-5-yl)benzyl)pyrrolidine-2-carboxylic acid

[0275] Step 1: To a mixture of (2S,4R)-1-(((9H-fluoren-9-yl)methoxy)carbonyl)-4-(4-bromobenzyl)pyrrolidine-2-carboxylic acid (1.2 g, 2.370 mmol) in water (10 mL) and 1,4-dioxane (10 mL) were added pyrimidin-5-ylboronic acid (0.294 g, 2.370 mmol), K₃PO₄ (1.509 g, 7.11 mmol) and Pd(dtbpf)Cl₂ (0.232 g, 0.355 mmol) under argon at 25° C. The resulting mixture was stirred at 80° C. for 2 h, then the reaction was cooled to room temperature and directly purified by Rp-Flash with the following conditions: Column: C¹⁸ gel column (330 g); Mobile Phase A: water (0.01% TFA); Mobile Phase B: MeCN; (Gradient: 0% B hold 5 min, up to 52% B within 35 min, 52% B hold 3 min; up to 95% B within 2 min, 95% B hold 10 min); Flow rate: 60 mL/min; Detector: UV 254 & 210 nm; RT: 35 min. The product-containing fractions were collected and roto-evaporated in vacuo to give (2S,4R)-1-(((9H-fluoren-9-yl)methoxy)carbonyl)-4-(4-(pyrimidin-5-yl)benzyl)pyrrolidine-2-carboxylic acid (629 mg, 1.244 mmol, 52% yield) as a yellow solid. MS ESI calculated for C₃₁H₂₈N₃O₄ [M+H]⁺ 506.20, found 506.15. ¹H NMR (300 MHz, CD₃OD) δ 9.11-9.04 (m, 3H), 7.78-7.76 (m, 2H), 7.69-7.58 (m, 4H), 7.41-7.25 (m, 6H), 4.38-4.19 (m, 4H), 3.69-3.54 (m, 1H), 3.29-3.08 (m, 1H), 2.79-2.66 (m, 3H), 2.19-1.95 (m, 2H).

[chemical structure]

### (S)-2-((((9H-Fluoren-9-yl)methoxy)carbonyl)amino)-3-(2-(4-(tert-butoxycarbonyl)phenyl)pyrimidin-5-yl)propanoic acid

[0276] Step 1: To a stirred solution of NiBr₂-glyme (0.951 g, 2.432 mmol) in DMA (100 mL) was added 1,10-phenanthroline (0.527 g, 2.432 mmol) at 25° C. under nitrogen atmosphere. The resulted solution was stirred at 50° C. for 1 h then cooled to room temperature, to which 2-Chloro-5-iodopyrimidine (5.85 g, 24.32 mmol), tert-butyl (R)-2-((((9H-fluoren-9-yl)methoxy)carbonyl)amino)-3-iodopropanoate (6 g, 12.16 mmol), TBAI (4.66 g, 12.16 mmol) and zinc (1.590 g, 24.32 mmol) were added at room temperature. The resulting mixture was stirred at 25° C. for 2 h, then quenched with H₂O (200 mL), extracted with EA (2×500 mL). The combined organic layer was washed with brine (3×200 mL), dried over anhydrous Na₂SO₄ and filtered. The filtrate was concentrated under reduced pressure. The residue was purified by silica gel column chromatography, eluted with 0-20% EA in PE to give tert-butyl (S)-2-((((9H-fluoren-9-yl)methoxy)carbonyl)amino)-3-(2-chloropyrimidin-5-yl)propanoate (4 g, 8.35 mmol, 70% yield) as an off-white solid. MS ESI calculated for C₂₆H₂₇ClN₃O₄[M+H]⁺ 480.16, found 480.25.

[0277] Step 2: To a stirred solution of tert-butyl (S)-2-((((9H-fluoren-9-yl)methoxy)carbonyl)amino)-3-(2-chloropyrimidin-5-yl)propanoate (6 g, 12.50 mmol) in DCM (15 mL) was added TFA (30 mL) at room temperature. The solution was stirred at 25° C. for 3 h then concentrated under reduced pressure. The residue was purified by RP-flash with the following conditions: Column: Flash C¹⁸ (330 g); Mobile Phase A: water (0.1% TFA), Mobile Phase B: ACN; (Gradient: 5% B hold 5 min, up to 30% B within 15 min, 30% B hold 5 min; up to 95% B within 20 min, 95% B hold 10 min); Flow rate: 90 mL/min; Detector: UV 210 nm; RT=40 min. The product-containing fractions were collected and evaporated in vacuo to give (S)-2-((((9H-fluoren-9-yl)methoxy)carbonyl)amino)-3-(2-chloropyrimidin-5-yl)propanoic acid (2.56 g, 6.04 mmol, 51% yield) as a yellow oil. MS ESI calculated for C₂₂H₁₉ClN₃O₄[M+H]⁺ 424.10, found 424.15.

[0278] Step 3: To a stirred mixture of (S)-2-((((9H-fluoren-9-yl)methoxy)carbonyl)amino)-3-(2-chloropyrimidin-5-yl)propanoic acid (2.56 g, 6.04 mmol), (4-(tert-butoxycarbonyl)phenyl)boronic acid (1.609 g, 7.25 mmol) and K₃PO₄ (6.41 g, 30.2 mmol) in water (20 mL) and dioxane (20 mL) was added Pd(dtbpf)Cl₂(0.590 g, 0.906 mmol) at room temperature. The resulting mixture was stirred at 80° C. for 2 h, then cooled to room temperature and concentrated under reduced pressure. The residue was purified by RP-flash with the following conditions: Column: Flash C¹⁸ (330 g); Mobile Phase A: water (0.1% TFA), Mobile Phase B: ACN; (Gradient: 5% B hold 5 min, up to 30% B within 15 min, 30% B hold 5 min; up to 95% B within 20 min, 95% B hold 10 min); Flow rate: 90 mL/min; Detector: UV 210 nm; RT=40 min. The product-containing fractions were collected and evaporated in vacuo to give (S)-2-((((9H-fluoren-9-yl)methoxy)carbonyl)amino)-3-(2-(4-(tert-butoxycarbonyl)phenyl)pyrimidin-5-yl)propanoic acid (2.5629 g, 4.53 mmol, 75% yield) as a yellow oil. MS ESI calculated for C₃₃H₃₂N₃O₆ [M+H]⁺ 566.22, found 566.40. ¹H NMR (300 MHz, CD₃OD) δ 8.75 (s, 2H), 8.42 (d, J=8.3 Hz, 2H), 8.02 (d, J=8.2 Hz, 2H), 7.75 (d, J=7.5 Hz, 2H), 7.66-7.45 (m, 2H), 7.42-7.15 (m, 4H), 4.62-4.44 (m, 1H), 4.38-4.20 (m, 2H), 4.12 (t, J=7.0 Hz, 1H), 3.35-3.33 (m, 1H), 3.11-2.97 (m, 1H), 1.62 (s, 9H).

[chemical structure]

### (S)-2-((((9H-fluoren-9-yl)methoxy)carbonyl)amino)-3-(6-(4-(tert-butoxycarbonyl)phenyl)pyridin-3-yl)propanoic acid

[0279] Step 1: To a stirred solution of NiCl₂-glyme (0.918 g, 4.18 mmol) in DMA (100 mL) was added 1,10-phenanthroline (0.905 g, 4.18 mmol) at rt under nitrogen atmosphere. The resulted solution was stirred at 50° C. for 1 h. 2-Chloro-5-iodopyridine (5 g, 20.88 mmol), tert-butyl (R)-2-((((9H-fluoren-9-yl)methoxy)carbonyl)amino)-3-iodopropanoate (12.36 g, 25.06 mmol), TBAI (8.01 g, 20.88 mmol) and Zn (2.73 g, 41.8 mmol) were added to the mixture above at rt and the resulted mixture was stirred at 25° C. for 2 h. The reaction was quenched with H₂O (200 mL), extracted with EtOAc (2×500 mL). The combined organic layer was washed with brine (3×200 mL), dried over anhydrous Na₂SO₄ and filtered. The filtrate was concentrated under reduced pressure and the residue was purified by silica gel column chromatography, eluted with 0-30% EtOAc in PE to give tert-butyl (S)-2-((((9H-fluoren-9-yl)methoxy)carbonyl)amino)-3-(6-chloropyridin-3-yl)propanoate. MS ESI calculated for C₂₇H₂₈ClN₂O₄[M+H]⁺ 479.17, found 479.20.

[0280] Step 2: To a stirred solution of tert-butyl (S)-2-((((9H-fluoren-9-yl)methoxy)carbonyl)amino)-3-(6-chloropyridin-3-yl)propanoate (5 g, 10.48 mmol) in DCM (5 mL) was added TFA (10 mL) at rt. The solution was stirred at 25° C. for 1 h. The solvent was concentrated under reduced pressure and the residue was purified by RP-flash with the following conditions: Column: Flash C¹⁸ (330 g); Mobile Phase A: water (0.1% TFA), Mobile Phase B: ACN; (Gradient: 5% B hold 5 min, up to 30% B within 15 min, 30% B hold 5 min; up to 95% B within 20 min, 95% B hold 10 min); Flow rate: 90 mL/min; Detector: UV 210 nm; RT=40 min. The product-containing fractions were collected and evaporated in vacuo to give (S)-2-((((9H-fluoren-9-yl)methoxy)carbonyl)amino)-3-(6-chloropyridin-3-yl)propanoic acid. MS ESI calculated for C₂₃H₂₀ClN₂O₄[M+H]⁺ 423.10, found 423.10.

[0281] Step 3: To a stirred solution of (S)-2-((((9H-fluoren-9-yl)methoxy)carbonyl)amino)-3-(6-chloropyridin-3-yl)propanoic acid (3 g, 7.09 mmol) in THF (25 mL) and water (5 mL) were added (4-(tert-butoxycarbonyl)phenyl)boronic acid (1.890 g, 8.51 mmol) and K₃PO₄ (7.53 g, 35.5 mmol) at 25° C. under nitrogen. The resulting solution was stirred at 25° C. for 10 min. Pd(dtbpf)Cl₂ (0.694 g, 1.064 mmol) was added to the solution and the mixture was then stirred at 60° C. for 16 h. The reaction was cooled to rt and quenched with H₂O (200 mL) and extracted with EtOAc (2×500 mL). The combined organic layer was washed with brine (3×200 mL), dried over anhydrous Na₂SO₄, and filtered. The filtrate was concentrated under reduced pressure and the residue was purified by RP-flash with the following conditions: Column: Flash C¹⁸ (330 g); Mobile Phase A: water (0.1% TFA), Mobile Phase B: ACN; (Gradient: 5% B hold 5 min, up to 60% B within 15 min, 60% B hold 15 min; up to 95% B within 10 min, 95% B hold 10 min); Flow rate: 90 mL/min; Detector: UV 210 nm; RT=55 min. The product-containing fractions were collected and evaporated in vacuo to give (S)-2-((((9H-fluoren-9-yl)methoxy)carbonyl)amino)-3-(6-(4-(tert-butoxycarbonyl)phenyl)pyridin-3-yl)propanoic acid. MS ESI calculated for C₃₄H₃₃N₂O₆ [M+H]⁺ 565.23, found 565.15; ¹H NMR (400 MHz, Methanol-d₄) δ 8.66 (d, J=1.9 Hz, 1H), 8.12-8.07 (m, 3H), 7.99-7.92 (m, 3H), 7.77 (d, J=7.5 Hz, 2H), 7.59-7.56 (m, 2H), 7.37-7.33 (m, 2H), 7.30-7.22 (m, 2H), 4.60-4.56 (m, 1H), 4.29-4.27 (m, 2H), 4.14-4.10 (m, 1H), 3.45-3.41 (m, 1H), 3.14-3.10 (m, 1H), 1.62 (s, 9H).

[chemical structure]

### (S)-2-((((9H-fluoren-9-yl)methoxy)carbonyl)amino)-3-(4′-(tert-butoxycarbonyl)-[1,1′-biphenyl]-4-yl)propanoic acid

[0282] Argon gas was bubbled through a mixture of (S)-2-((((9H-fluoren-9-yl)methoxy)carbonyl)amino)-3-(4-bromophenyl)propanoic acid (6 g, 12.87 mmol), (4-(tert-butoxycarbonyl)phenyl)boronic acid (4.29 g, 19.30 mmol) and K₃PO₄ (8.19 g, 38.6 mmol) in THF (40 mL) for 10 min, then [1,1′-bis(di-tert-butylphosphino)ferrocene]dichloropalladium (II) (0.839 g, 1.287 mmol) was added. After the resulting mixture was stirred at 50° C. for 16 h, it was diluted with EtOAc (300 mL) and washed with aqueous saturated NaHCO₃ (3×80 mL), brine (2×40 mL), dried over Na₂SO₄ and filtered. The filtrate was concentrated under reduced pressure. The residue was purified by silica gel column chromatography, eluted with gradient 0%-50% EtOAc in PE. The product-containing fractions were collected and roto-evaporated in vacuo. The residue was re-purified by combi-Flash with the following conditions: Column: Column: C18 gel column (330 g), 20-35 m; Mobile Phase A: 0.5% aq. TFA; Mobile Phase B: MeCN; (Gradient: 0% B hold 10 min, up to 62.3% B within 25 min, 62.3% B hold 6.2 min; up to 95% B within 2 min, 95% B hold 10 min); Flow rate: 90 mL/min; Detector: UV 254 & 210 nm; RT: 32.32 min. The product-containing fractions were collected and concentrated under reduced pressure to afford (S)-2-((((9H-fluoren-9-yl)methoxy)carbonyl)amino)-3-(4′-(tert-butoxycarbonyl)-[1,1-biphenyl]-4-yl)propanoic acid. MS ESI calculated for C₃₅H₃₄NO₆ [M+1]^{+ 564.23}, found 564.15. ¹H NMR (300 MHz, Methanol-d₄) δ 7.97-7.95 (m, 2H), 7.78-7.76 (m, 2H), 7.61-7.53 (m, 6H), 7.38-7.21 (m, 2H), 4.51-4.11 (m, 4H), 3.32-3.25 (m, 1H), 3.03-2.95 (m, 1H), 1.61 (s, 9H).

[chemical structure]

### (2S,3S)-2-amino-3-(4-fluoro-1H-indol-3-yl)butanoic acid

[0283] Into a 1-L 3-necked round-bottom flask purged and maintained with an inert atmosphere of nitrogen, was placed 4-fluoro-1H-indole (10 g, 1.00 eq), L-threonine (10.6 g, 1.20 eq), DMSO (100 mL), potassium phosphate buffer (0.2 M, 300 mL, pH=7.4). The reaction mixture was heated to 65° C., then PfTrpB-7E6 (2.5 g, 25 wt %) and 3-hydroxy-2-methyl-5-([phosphonooxy]methyl)-4-pyridinecarboxaldehyde (0.078 g, 0.004 eq) were added. The resulting solution was stirred overnight at 65° C. The mixture was then cooled to rt and used directly in the next step.

[0284] Into the above reaction mixture, THF (100 mL), sodium carbonate (23.56 g, 3.0 eq.) and 2,5-dioxopyrrolidin-1-yl 9H-fluoren-9-ylmethyl carbonate (29.96 g, 1.20 eq.) were added at 0° C. The resulting solution was stirred overnight at rt. The pH was adjusted to 4 by 3 M HCl and the solid precipitate was filtered away. The resulting solution was extracted with EtOAc (3×500 mL). The organic fractions were combined, and washed with brine (1 L), dried over anhydrous sodium sulfate and concentrated under vacuum. The mixture was applied onto a silica gel column with MeOH:DCM=1:5. HPLC-MS: (ES, m/z): [M+1]: 459. ¹H NMR (300 MHz, DMSO-d₆) δ 12.60 (s, 1H), 11.15 (s, 1H), 7.87 (d, J=7.6 Hz, 2H), 7.76-7.49 (m, 3H), 7.47-7.34 (m, 2H), 7.34-7.16 (m, 4H), 7.03 (td, J=7.9, 5.0 Hz, 1H), 6.73 (dd, J=11.8, 7.7 Hz, 1H), 4.36 (t, J=8.5 Hz, 1H), 4.31-4.02 (m, 3H), 3.51 (q, J=7.4 Hz, 1H), 1.31 (d, J=7.0 Hz, 4H), 0.78 (s, 1H).

[chemical structure]

### (2S,3S)-2-amino-3-(4-chloro-1H-indol-3-yl)butanoic acid

[0285] Into a 1-L 3-necked round-bottom flask purged and maintained with an inert atmosphere of nitrogen, was placed 4-chloro-1H-indole (10 g, 1.00 eq.), L-threonine (14.09 g, 1.8 eq.), DMSO (100 mL), potassium phosphate buffer (0.2 M, 300 mL, PH=7.4), the reaction mixture was heated to 65° C., then PfTrpB-7E6 (7.5 g, 25 wt %) and 3-hydroxy-2-methyl-5-([phosphonooxy]methyl)-4-pyridinecarboxaldehyde (174 mg, 0.01 eq.) were added. The resulting solution was stirred for 36 h at 65° C. The mixture was then cooled to rt and used directly in the next step.

[0286] Into the above reaction mixture, THF (100 mL), sodium carbonate (20.9 g, 3.0 eq.) and 2,5-dioxopyrrolidin-1-yl 9H-fluoren-9-ylmethyl carbonate (31.0 g, 1.40 eq.) were added at 0° C. The resulting solution was stirred overnight at rt. The pH was adjusted to 4 by 3 M HCl and the solid precipitate was filtered away. The resulting solution was extracted with EtOAc (3×500 mL). The organic fractions were combined, and washed with brine (1 L), dried over anhydrous sodium sulfate and concentrated under vacuum. HPLC-MS: (ES, m/z): [M+1]: 475.

[chemical structure]

### (2S,3S)-2-amino-3-(naphthalen-1-yl)butanoic acid

[0287] Step 1: To a solution of (2S,3R)-2-((((9H-fluoren-9-yl)methoxy)carbonyl)amino)-3-hydroxybutanoic acid (250 g, 1.00 eq) in DMF (1.5 L) was added benzyl bromide (250 g, 2.00 eq) dropwise at 20° C. Then, cesium carbonate (477 g, 2.00 eq) was added and the solution was stirred at 20° C. for 3 h. The reaction was poured into ice H₂O (3 L) and extracted with EtOAc (500 mL×3). The organic phase was washed with 3% LiCl solution (500 mL×2) and brine (500 mL), dried over sodium sulfate and concentrated under vacuum at 40° C. The crude product was triturated with methyl tert-butyl ether:PE=6:1. ¹H NMR (400 MHz, CDCl₃): δ 7.77 (d, J=7.6 Hz, 1H), 7.40 (d, J=8.0 Hz, 1H), 7.31-7.36 (m, 10H), 5.65-5.71 m, 1H), 5.13-5.31 (m, 3H), 4.39-4.43 (m, 3H), 4.22-4.25 (m, 1H), 1.25 (d, J=6.4 Hz, 3H)

[0288] Step 2: To a 3-neck round-bottom flask was added (2S,3R)-benzyl 2-((((9H-fluoren-9-yl)methoxy)carbonyl)amino)-3-hydroxybutanoate (125 g, 1.00 eq) and DCE (750 mL) with an inert atmosphere of nitrogen. The reaction was cooled to 0° C. followed by the addition of NIS (195 g, 3.00 eq) and PPh₃ (228 g, 3.00 eq). The temperature was raised to 50° C. and the reaction mixture was stirred for 3 h. The reaction was poured into ice H₂O (500 mL) and extracted with DCM (500 mL×2). The organic phase was dried over sodium sulfate and concentrated under vacuum at 40° C. The residue was purified by silica gel column chromatography (PE/EtOAc=1/0 to 0/1). ¹H NMR (400 MHz, CDCl₃): δ 7.78 (d, J=7.6 Hz, 2H), 7.68 (d, J=7.2 Hz, 2H), 7.33-7.43 (m, 9H), 5.27-5.68 (m, 1H), 5.21-5.23 (m, 2H), 4.39-4.52 (m, 3H), 4.25-4.38 (m, 1H), 1.91-1.95 (m, 3H).

[0289] Step 3: To a 3-neck round-bottom flask was placed 2-((((9H-fluoren-9-yl) methoxy) carbonyl)amino)-3-iodobutanoate, 1-iodonaphthalene (42.2 g, 1.20 eq), TBAI (76.7 g, 1.50 eq), Zn (19.0 g, 2.10 eq) and DMA (750 mL). To a second 3-neck round-bottom flask was placed picolinimidamide·2HCl (42.2 g, 1.20 eq), NiCl₂·glyme (7.61 g, 0.25 eq) and DMA (750 mL) at 25° C. Under argon, the contents of the second flask were added to the first flask. The resulting mixture was then stirred for 12 h at 25° C. The reaction was poured into ice H₂O (3 L) and extracted with EtOAc (1 L×2). The organic phase was dried over sodium sulfate and concentrated under vacuum at 40° C. The crude product was purified by reversed-phase HPLC (MeCN:H₂O). HPLC-MS: [M+23]: 564. ¹H NMR (400 MHz, CDCl₃) δ: 8.17-8.24 (m, 1H), 8.15-8.17 (m, 1H), 7.77-7.87 (m, 2H), 7.76-7.77 (m, 4H), 7.30-7.41 (m, 10H), 5.30-5.38 (m, 1H), 4.96-5.04 (m, 3H), 4.85-4.87 (m, 1H), 4.30-4.34 (m, 1H), 4.18-4.26 (m, 4H), 1.43-1.45 (m, 3H).

[0290] Step 4: 143 g of (2S)-benzyl 2-((((9H-fluoren-9-yl) methoxy) carbonyl) amino)-3-(naphthalen-1-yl)butanoate was separated by SFC. The organic phase was concentrated under vacuum at 35° C.

[0291] Peak 1: (2S,3R)-benzyl 2-((((9H-fluoren-9-yl)methoxy)carbonyl) amino)-3-(naphthalene-1-yl)butanoate. ¹H NMR (400 MHz, DMSO-d₆): δ 8.11-8.12 (m, 2H), 8.10-8.11 (m, 1H), 7.88-7.90 (m, 2H), 7.54-7.88 (m, 1H), 7.44-7.53 (m, 2H), 7.42-7.44 (m, 4H), 7.33-7.42 (m, 3H), 7.27-7.33 (m, 6H), 7.08-7.09 (m, 2H), 4.91-4.94 (m, 1H), 4.79-4.82 (m, 1H), 4.58 (t, J=8.0 Hz), 4.17-4.25 (m, 4H), 1.39 (d, J=6.8 Hz, 3H). Peak 2: (2S,3S)-benzyl 2-((((9H-fluoren-9-yl)methoxy) carbonyl) amino)-3-(naphthalen-1-yl)butanoate. ¹H NMR (400 MHz, DMSO-d₆): δ 7.92-8.15 (m, 1H), 7.86-7.92 (m, 1H), 7.84-7.86 (m, 1H), 7.57-7.84 (m, 2H), 7.56-7.57 (m, 1H), 7.41-7.54 (m, 4H), 7.30-7.38 (m, 4H), 7.27-7.30 (m, 7H), 5.08-5.14 (m, 2H), 4.65 (t, J=8.0 Hz), 4.23-4.26 (m, 1H), 4.05-4.18 (m, 3H), 1.30 (d, J=6.8 Hz, 3H).

[0292] Step 5: To a 3-neck round-bottom flask was added (2S,3S)-benzyl 2-((((9H-fluoren-9-yl) methoxy) carbonyl)amino)-3-(naphthalen-1-yl)butanoate (40.0 g, 1.00 eq) and THF (200 mL). 10% wet Pd/C (7.00 g) was added and the reaction was purged 3 times with H₂ and stirred at 25° C. for 12 h under H₂(15 psi). The reaction was filtered through a CELITE pad and concentrated under vacuum at 35° C. The crude product was triturated with PE at 25° C. for 1 h. After filtration, the filter cake was dissolved in MeCN (100 mL) and concentrated under vacuum at 35° C. to remove residual solvent. HPLC-MS: [M+23]: 474. ¹H NMR (400 MHz, DMSO-d₆) δ 12.78 (s, 1H), 8.23 (d, J=7.6 Hz, 1H), 7.86-7.88 (m, 1H), 7.80-7.86 (m, 2H), 7.61-7.80 (m, 2H), 7.55-7.59 (m, 4H), 7.481-7.55 (m, 1H), 7.40-7.48 (m, 3H), 7.27-7.29 (m, 2H), 4.28-4.60 (m, 1H), 4.24-4.28 (m, 1H), 4.17-4.24 (m, 2H), 4.04-4.15 (m, 1H), 1.36 (d, J=6.8 Hz, 3H).

[chemical structure]

### L-Tyrosine O-ethyl acetamide or (S)-3-(4-(2-acetamidoethoxy)phenyl)-2-aminopropanoic acid

[0293] Step 1: To a stirred solution of methyl (tert-butoxycarbonyl)-L-tyrosinate (10.0 g, 33.9 mmol), benzyl (2-bromoethyl)carbamate (26.2 g, 102 mmol) and TBAB (5.46 g, 16.93 mmol) in DMF (150 mL) was added potassium carbonate (14.04 g, 102 mmol) at rt. The mixture was then stirred at 50° C. for 24 h. The mixture was cooled to rt, quenched with water (250 mL) and extracted with EtOAc (2×500 mL). The combined organic layers were washed with brine (3×150 mL), dried over anhydrous sodium sulfate and filtered. The filtrate was concentrated under reduced pressure, and the residue was purified by silica gel column chromatography, eluted with 0-30% EtOAc in PE. MS ESI calculated for C₂₅H₃₂N₂O₇ [M+Na]⁺ 495.22, found 495.10; ¹H NMR (300 MHz, CDCl₃) δ 7.38-7.32 (m, 5H), 7.04 (d, J=8.4 Hz, 2H), 6.81 (d, J=8.4 Hz, 2H), 5.31 (br, 1H), 5.21 (s, 2H), 4.97 (br, 1H), 4.56-4.53 (m, 1H), 4.03 (t, J=5.0 Hz, 2H), 3.72 (s, 3H), 3.64-3.58 (m, 2H), 3.06-3.01 (m, 2H), 1.43 (s, 9H).

[0294] Step 2: To a stirred solution of methyl (S)-3-(4-(2-(((benzyloxy)carbonyl)amino)ethoxy)phenyl)-2-((tert-butoxycarbonyl)amino)propanoate (16.0 g, 33.9 mmol) and acetic anhydride (6.39 mL, 67.7 mmol) in THF (200 mL) was added Pd/C (3.60 g, 33.9 mmol, dry, 10% wt) at rt under nitrogen atmosphere. The mixture was degassed with hydrogen 3 times and stirred at 20° C. for 4 h. DIPEA (17.74 mL, 102 mmol) was added to the mixture and stirred at 20° C. for 1 h. The mixture was filtered, and the filtrate was concentrated under reduced pressure. The residue was purified by silica gel column chromatography, eluted with 0-3% MeOH in DCM. MS ESI calculated for C₁₉H₂₈N₂O₆ [M+Na]⁺ 403.19, found 403.10; ¹H NMR (300 MHz, CDCl₃) δ 7.05 (d, J=8.4 Hz, 2H), 6.85-6.80 (m, 2H), 5.99 (br, 1H), 5.32 (br, 1H), 4.99-4.97 (m, 1H), 4.02 (t, J=5.0 Hz, 2H), 3.72 (s, 3H), 3.69-3.63 (m, 2H), 3.10-2.89 (m, 2H), 2.02 (s, 3H), 1.42 (s, 9H).

[0295] Step 3: To a stirred solution of methyl (S)-3-(4-(2-acetamidoethoxy)phenyl)-2-((tert-butoxycarbonyl)amino)propanoate (12.5 g, 32.9 mmol) THF (100 mL) was added lithium hydroxide (65.7 mL, 65.7 mmol, 1 N in water) at rt. The solution was stirred at 20° C. for 2 h. The pH of the solution was adjusted to 3 with 1 N HCl. The aqueous layer was extracted with EtOAc (2×250 mL). The combined organic layers were washed with brine (150 mL), dried over anhydrous sodium sulfate, filtered, and concentrated under reduced pressure. MS ESI [M+H]⁺: 367.10.

[0296] Step 4: To a stirred solution of (S)-3-(4-(2-acetamidoethoxy)phenyl)-2-((tert-butoxycarbonyl)amino)propanoic acid (12.5 g, 30.7 mmol) in THF (20 mL) was added 4 N HCl in dioxane (200 mL) at rt. The solution was stirred at 20° C. for 1 h. The solvent was concentrated under reduced pressure. MS ESI [M+H]⁺: 267.05.

[0297] Step 5: To a stirred mixture of (S)-3-(4-(2-acetamidoethoxy)phenyl)-2-aminopropanoic acid hydrochloride (9.50 g, 25.1 mmol) and NaHCO₃ (10.54 g, 126 mmol) in THF (100 mL) and water (100 mL) was added Fmoc-OSu (7.62 g, 22.59 mmol) at rt. The mixture was stirred at 20° C. for 1 h. The pH value of the solution was adjusted to 3 with 1 N HCl. The aqueous phase was extracted with EtOAc (2×500 mL). The combined organic layers were washed with brine (150 mL), dried over anhydrous sodium bicarbonate and filtered. The filtrate was concentrated under reduced pressure, and the residue was recrystallized from EtOAc (200 mL). The solid was collected by filtration and dried under vacuum. MS ESI [M+H]⁺: 489.05; ¹H NMR (300 MHz, Methanol-d₄) δ 7.79 (d, J=7.6 Hz, 2H), 7.62-7.57 (m, 2H), 7.42-7.26 (m, 4H), 7.17-7.14 (m, 2H), 6.83 (d, J=8.4 Hz, 2H), 4.41-4.31 (m, 2H), 4.29-4.10 (m, 2H), 3.96 (t, J=4.8 Hz, 2H), 3.51 (t, J=5.4 Hz, 2H), 3.19-3.13 (m, 1H), 2.92-2.84 (m, 1H), 1.94 (s, 3H).

[chemical structure]

### (2S,3R)-1-(((9H-fluoren-9-yl)methoxy)carbonyl)-3-(3-fluorophenyl)pyrrolidine-2-carboxylic acid

[0298] To a solution of commercially available ((2S,3R)-3-(3-fluorophenyl)pyrrolidine-2-carboxylic acid (495 mg, 2.366 mmol) in acetone (16 mL) were added water (8 mL) and sodium bicarbonate (2S,3R)-3-(3-fluorophenyl)pyrrolidine-2-carboxylic acid (495 mg, 2.366 mmol), the mixture was stirred for 10 min (pH 9.5 targeted), Fmoc-OSu (878 mg, 2.60 mmol) was added and the resulting mixture was stirred overnight at room temperature. The reaction was acidified with sodium bisulfate (1M, 75 mL). The aqueous was washed with DCM, the organic phase was dried with anhydrous sodium sulfate, filtered. The filtrate was concentrated under reduced pressure. The crude material was purified by column chromatography using a RediSep Rf silica 80 g prepackaged column, eluting with a 0-10% gradient of MeOH in DCM over the course of 33 minutes, after concentration under reduced pressure to provide the title compound. HPLC-MS: [M+H]⁺: 432.2; ¹H NMR (500 MHz, CDCl₃) δ 7.80 (d, J=7.5 Hz, 2H), 7.62 (t, J=7.1 Hz, 2H), 7.44 (t, J=7.4 Hz, 2H), 7.40-7.25 (m, 3H), 7.05-6.89 (m, 3H), 4.60-4.46 (m, 2H), 4.35-4.25 (m, 1H), 3.79-3.50 (m, 3H), 2.48-2.30 (m, 1H), 2.10-1.96 (m, 1H).

[chemical structure]

### (2S,4R)-1-(((9H-fluoren-9-yl)methoxy)carbonyl)-4-(3,4-difluorobenzyl)pyrrolidine-2-carboxylic acid

[0299] To a solution of commercially available (2S,4R)-4-(3,4-difluorobenzyl)pyrrolidine-2-carboxylic acid (1000 mg, 4.15 mmol) in acetone (16 mL) were added water (8 mL) and sodium bicarbonate (1741 mg, 20.73 mmol), the mixture was stirred for 10 min (pH 9.5 targeted), Fmoc-OSu (1538 mg, 4.56 mmol) was added and the resulting mixture was stirred overnight at room temperature. The reaction was acidified with sodium bisulfate (1M, 38 ml). The aqueous was washed with DCM, the organic phase was dried with anhydrous sodium sulfate, filtered. The filtrate was concentrated under reduced pressure. The crude material was purified by column chromatography using a RediSep Rf silica 40 g prepackaged column, eluting with a 0-10% gradient of MeOH in DCM over the course of 22 minutes, and concentrated under reduced pressure to provide the title compound. HPLC-MS: [M+H]⁺: 464.4; ¹H NMR (500 MHz, CDCl₃) δ 7.76 (d, J=7.1 Hz, 2H), 7.56 (d, J=6.8 Hz, 2H), 7.45-7.30 (m, 4H), 7.17-7.05 (m, 1H), 7.00-6.93 (m, 1H), 6.89-6.82 (m, 1H), 4.57-4.38 (m, 3H), 4.33-4.23 (m, 1H), 3.54-3.47 (m, 1H), 3.03 (t, J=9.3 Hz, 1H), 2.75-2.50 (m, 2H), 2.38-2.32 (m, 1H), 2.0-1.80 (m, 2H).

[chemical structure]

[chemical structure]

### (S)-2-((((9H-fluoren-9-yl)methoxy)carbonyl)amino)-3-(3-(4-(tert-butoxycarbonyl)phenyl)bicyclo[1.1.1]pentan-1-yl)propanoic acid

[0300] Step 1: To a stirred solution of 3-(methoxycarbonyl)bicyclo[1.1.1]pentane-1-carboxylic acid (5 g, 29.4 mmol), 2-hydroxyisoindoline-1,3-dione (5.27 g, 32.3 mmol) and DMAP (0.359 g, 2.94 mmol) in DCM (65 mL) was added EDCI (6.20 g, 32.3 mmol) at room temperature. The resulting mixture was stirred at 25° C. for 16 h. The solid was filtered out and the filtrate was concentrated under reduced pressure. The residue was purified by a silica gel column chromatography, eluted with 0-30% EA in PE to afford 1-(1,3-dioxoisoindolin-2-yl) 3-methyl bicyclo[1.1.1]pentane-1,3-dicarboxylate. ¹H NMR (400 MHz, CDCl₃) δ 7.96-7.83 (m, 2H), 7.86-7.75 (m, 2H), 3.73 (s, 3H), 2.56 (s, 6H).

[0301] Step 2: To a stirred solution of NiBr₂·3H₂O (1.549 g, 5.68 mmol) in DMA (180 mL) was added dtbbty (1.906 g, 7.10 mmol) at room temperature under nitrogen atmosphere. The resulting mixture was stirred at 50° C. for 30 min. The mixture was cooled to room temperature. Tert-butyl 4-iodobenzoate (7.2 g, 23.67 mmol), 1-(1,3-dioxoisoindolin-2-yl) 3-methyl bicyclo[1.1.1]pentane-1,3-dicarboxylate (7.46 g, 23.67 mmol), TMS-Cl (0.303 mL, 2.367 mmol) and zinc (7.74 g, 118 mmol) were added to the mixture at room temperature. The resulting mixture was stirred at 25° C. for 2 h. The reaction was quenched by brine (400 mL), extracted with EA (3×800 mL). The combined organic layer was washed with brine (3×300 mL), dried over anhydrous Na₂SO₄. After filtration, the filtrate was concentrated under reduced pressure and the residue was purified by a silica gel column chromatography, eluted with 0-40% EA in PE to afford methyl 3-(4-(tert-butoxycarbonyl)phenyl)bicyclo[1.1.1]pentane-1-carboxylate. ¹H NMR (300 MHz, CDCl₃) δ 7.98-7.88 (m, 2H), 7.29-7.19 (m, 2H), 3.72 (s, 3H), 2.34 (s, 6H), 1.59 (s, 9H).

[0302] Step 3: To a solution of methyl 3-(4-(tert-butoxycarbonyl)phenyl)bicyclo[1.1.1]pentane-1-carboxylate (2.7 g, 8.93 mmol) in THF (17.86 mL) was added LiOH (17.86 mL, 17.86 mmol, 1 N in water) at room temperature. The resulting mixture was stirred at room temperature for 2 h. The solution was acidified with 1 M HCl (15 mL). The solution was extracted with EA (3×150 mL). The combined organic layers were washed with brine (3×150 mL), dried over anhydrous Na₂SO₄ and filtered. The filtrate was concentrated under reduced pressure to afford 3-(4-(tert-butoxycarbonyl)phenyl)bicyclo[1.1.1]pentane-1-carboxylic acid (2.55 g, crude). MS ESI calculated for C₁₇H₁₉O₄[M−H]—287.14, found 287.05.

[0303] Step 4: To a stirred solution of benzyl (S)-2-(tert-butyl)-4-methylene-5-oxooxazolidine-3-carboxylate (602 mg, 2.081 mmol) in DMF (20 mL) were added 3-(4-(tert-butoxycarbonyl)phenyl)bicyclo[1.1.1]pentane-1-carboxylic acid (600 mg, 2.081 mmol), 4CzIPN (32.8 mg, 0.042 mmol) and K₂HPO₄ (906 mg, 5.20 mmol). The reaction solution was irradiated with a 34 W blue LED lamp and stirred at room temperature for 48 h under argon. The reaction was quenched with water (100 mL) and extracted with EA (3×150 mL). The combined organic layers were washed with brine (3×150 mL), dried over anhydrous Na₂SO₄ and filtered. The filtrate was concentrated under reduced pressure and the residue was purified by a silica gel column chromatography, eluted with gradient 0%-25% EA in PE to afford benzyl (2S,4S)-4-((3-(4-(tert-butoxycarbonyl)phenyl)bicyclo[1.1.1]pentan-1-yl)methyl)-2-(tert-butyl)-5-oxooxazolidine-3-carboxylate. MS ESI calculated for C₃₂H₄₀NO₆ [M-tBu+H]⁺ 478.28, found 478.15. ¹H NMR (400 MHz, CDCl₃) δ 7.94-7.84 (m, 2H), 7.41-7.35 (m, 5H), 7.18 (d, J=8.0 Hz, 2H), 5.56 (s, 1H), 5.24-5.12 (m, 2H), 4.34-4.31 (m, 1H), 2.23-2.17 (m, 1H), 2.09-2.01 (m, 1H), 1.99-1.83 (m, 6H), 1.59 (s, 9H), 0.97 (s, 9H).

[0304] Step 5: To a solution of benzyl (2S,4S)-4-((3-(4-(tert-butoxycarbonyl)phenyl)bicyclo[1.1.1]pentan-1-yl)methyl)-2-(tert-butyl)-5-oxooxazolidine-3-carboxylate (1.6 g, 3.00 mmol) in THF (16 mL) was added LiOH (7.50 mL, 7.50 mmol, 1 N in water) at 0° C. The solution was stirred at room temperature for 4 h. The solution was cooled to 0° C. and the pH value was adjusted to 3-4 with 1 M HCl (7.5 mL). The resulting solution was dilute with water (50 mL) and extracted with EA (3×100 mL). The organic layer was washed with brine (3×100 mL), dried over anhydrous Na₂SO₄ and filtered. The filtrate was concentrated under reduced pressure to afford (S)-2-(((benzyloxy)carbonyl)amino)-3-(3-(4-(tert-butoxycarbonyl)phenyl)bicyclo[1.1.1]pentan-1-yl)propanoic acid. MS ESI calculated for C₂₇H₃₁NO₆Na [M+Na]⁺ 488.20, found 488.10. ¹H NMR (400 MHz, CD₃OD) δ 7.88-7.83 (m, 2H), 7.41-7.35 (m, 2H), 7.35-7.25 (m, 3H), 7.24-7.19 (m, 2H), 5.19-5.04 (m, 2H), 4.24-4.20 (m, 1H), 2.13-2.01 (m, 1H), 2.03-1.87 (m, 7H), 1.58 (s, 9H).

[0305] Step 6: To a solution of (S)-2-(((benzyloxy)carbonyl)amino)-3-(3-(4-(tert-butoxycarbonyl)phenyl)bicyclo[1.1.1]pentan-1-yl)propanoic acid (1.65 g, 3.54 mmol) in THF (40 mL) were added Pd—C (0.377 g, 0.354 mmol, dry, 10% wt) at room temperature under nitrogen atmosphere. The resulting mixture was degassed with hydrogen three times and stirred at room temperature for 2 h. The resulting product ((S)-2-amino-3-(3-(4-(tert-butoxycarbonyl)phenyl)bicyclo[1.1.1]pentan-1-yl)propanoic acid (1.17 g) was used into the next step without further purification. MS ESI calculated for C₁₉H₂₆NO₄ [M+H]⁺ 332.17, found 332.15.

[0306] Step 7: A reaction mixture of (S)-2-amino-3-(3-(4-(tert-butoxycarbonyl)phenyl)bicyclo[1.1.1]pentan-1-yl)propanoic acid (1.17 g, 3.53 mmol) in THF (40 mL) and water (40 mL) were added NaHCO₃ (1.483 g, 17.65 mmol) and Fmoc-OSu (1.191 g, 3.53 mmol) at 0° C. The reaction mixture was stirred at room temperature for 16 h. The resulting mixture was filtered. Filter cake was washed with THF (2×100 mL). The solvent was concentrated under reduced pressure. The pH value of the solution was adjusted to 4 with 1 N HCl (17.6 mL) and extracted with EA (3×100 mL). The combined organic layers were washed with brine (3×100 mL), dried with anhydrous Na₂SO₄ and filtered. The resulting solution was purified by RP-Flash chromatography, eluted with 2-70% acetonitrile in water (0.05% TFA) to afford (S)-2-((((9H-fluoren-9-yl)methoxy)carbonyl)amino)-3-(3-(4-(tert-butoxycarbonyl)phenyl)bicyclo[1.1.1]pentan-1-yl)propanoic acid. MS ESI calculated for C₃₄H₃₄NO₆ [M−H]-552.25, found 552.40. ¹H NMR (300 MHz, CD₃OD) δ 7.90-7.76 (m, 2H), 7.73-7.65 (m, 4H), 7.40-7.24 (m, 6H), 4.52-4.37 (m, 2H), 4.25-4.18 (m, 2H), 2.14-2.03 (m, 1H), 1.99-1.86 (m, 7H), 1.60-1.54 (m, 9H).

[chemical structure]

### (S)-2-((((9H-fluoren-9-yl)methoxy)carbonyl)amino)-3-(4′-carbamoyl-[1,1′-biphenyl]-4-yl)propanoic acid

[0307] To a stirred solution of (S)-2-((((9H-fluoren-9-yl)methoxy)carbonyl)amino)-3-(4-iodophenyl)propanoic acid (15 g, 29.2 mmol) in THF (246 mL) were added PdCl₂(dtbpf) (2.86 g, 4.38 mmol) and potassium phosphate tribasic (88 mL, 88 mmol, 1 N in water) at room temperature. The solution was stirred at 50° C. for 2 h. The resulting solution was cooled to room temperature. The pH was adjusted to 3 with 1H HCl and extracted with EA (3×250 mL). The organic layers were combined, washed with brine (4×200 mL), dried over anhydrous Na₂SO₄ and filtered. The filtrate was concentrated under reduced pressure and the residue was recrystallized from EtOH (100 mL) to give (S)-2-((((9H-fluoren-9-yl)methoxy)carbonyl)amino)-3-(4′-carbamoyl-[1,1′-biphenyl]-4-yl)propanoic acid. MS ESI calculated for C₃₁H₂₇N₂O₅ [M+H]⁺ 507.18, found 507.45. ¹H NMR (400 MHz, DMSO-d₆) δ 12.87 (s, 1H), 8.02 (s, 1H), 8.07-7.96 (m, 2H), 7.94-7.82 (m, 2H), 7.78-7.60 (m, 7H), 7.39-7.29 (m, 5H), 7.29-7.19 (m, 2H), 4.20-4.13 (m, 4H), 3.17-3.13 (m, 1H), 2.93-2.90 (m, 1H).

[chemical structure]

### (3S,5R)-1-(((9H-fluoren-9-yl)methoxy)carbonyl)-5-carboxy-N,N,N-trimethylpyrrolidin-3-aminium chloride

[0308] Step 1: To a mixture of 1-(tert-butyl) 2-methyl (2R,4S)-4-aminopyrrolidine-1,2-dicarboxylate (3 g, 12.28 mmol) in MeOH (30 mL) were added NaHCO₃ (8.25 g, 98 mmol) and CH₃I (4.61 mL, 73.7 mmol) at ambient temperature. The reaction was stirred at ambient temperature for 16 h. The resulting solution was filtered. The filtrate was concentrated in vacuo to afford crude product. The crude product was dissolved in DCM and filtered, the filter was concentrated in vacuo to afford (3S,5R)-1-(tert-butoxycarbonyl)-5-(methoxycarbonyl)-N,N,N-trimethylpyrrolidin-3-aminium iodide. MS ESI calculated for C₁₄H₂₇N₂O₄ [M-I]⁺ 287.20, found 287.15.

[0309] Step 2: To a mixture of (3S,5R)-1-(tert-butoxycarbonyl)-5-(methoxycarbonyl)-N,N,N-trimethylpyrrolidin-3-aminium iodide (6.5 g, 10.98 mmol) in THF (23 mL) was added LiOH (21.97 mL, 21.97 mmol, 1 M in water) at ambient temperature. The reaction was stirred at ambient temperature for 4 h. The resulting solution was acidified to pH 5 with 1 M HCl and concentrated in vacuo to afford (3S,5R)-1-(tert-butoxycarbonyl)-5-carboxy-N,N,N-trimethylpyrrolidin-3-aminium chloride. MS ESI calculated for C₁₃H₂₅N₂O₄ [M-Cl]⁺ 273.18, found 273.15.

[0310] Step 3: To a mixture of (3S,5R)-1-(tert-butoxycarbonyl)-5-carboxy-N,N,N-trimethylpyrrolidin-3-aminium chloride (6.6 g, 10.69 mmol) in DCM (20 mL) was added TFA (20 mL, 260 mmol) at ambient temperature. The reaction was stirred at ambient temperature for 2 h. The resulting solution was concentrated in vacuo to afford 2,2,2-trifluoroacetic acid, (3S,5R)-1-(tert-butoxycarbonyl)-5-carboxy-N,N,N-trimethylpyrrolidin-3-aminium salt. MS ESI calculated for C₈H₁₇N₂O₂ [M-CF₃COO]⁺ 173.13, found 173.25.

[0311] Step 4: To a mixture of 2,2,2-trifluoroacetic acid, (3S,5R)-5-carboxy-N,N,N-trimethylpyrrolidin-3-aminium salt (8.1 g, 14.10 mmol) in THF (40 mL) and water (40 mL) were added NaHCO₃ (5.92 g, 70.5 mmol) and Fmoc-OSu (4.28 g, 12.69 mmol) at room temperature. The reaction was stirred at room temperature for 4 h. The resulting solution was acidified to pH 5 with diluted HCl and concentrated in vacuo. The residue was suspended in DCM (with 10% MeOH) and filtered. The filtrate was concentrated in vacuo. The residue was purified by RP flash with the following conditions: Column: Flash C¹⁸ (330 g); Mobile Phase A: water (2 mmol HCl), Mobile Phase B: ACN; (Gradient: 2% B hold 5 min, up to 35% B within 15 min, 35% B hold 8 min; up to 98% B within 5 min, 99% B hold 5 min); Flow rate: 80 mL/min; Detector: UV 210 nm; RT=38 min. The product-containing fractions were collected and concentrated in vacuo to (3S,5R)-1-(((9H-fluoren-9-yl)methoxy)carbonyl)-5-carboxy-N,N,N-trimethylpyrrolidin-3-aminium chloride. MS ESI calculated for C₂₃H₂₇N₂O₄ [M-Cl]⁺ 395.20, found 395.20. ¹H NMR (300 MHz, DMSO-d₆) δ 13.30 (s, 1H), 7.94-7.89 (m, 2H), 7.72-7.64 (m, 2H), 7.46-7.33 (m, 4H), 4.57-4.14 (m, 5H), 3.86-3.78 (m, 2H), 3.12-3.10 (m, 9H), 2.83-2.73 (m, 1H), 2.50-2.35 (m, 1H).

[chemical structure]

### (S)-2-((((9H-fluoren-9-yl)methoxy)carbonyl)amino)-3-(4-sulfamoylphenyl)propanoic acid

[0312] Step 1: A mixture of acetyl-L-phenylalanine (1 g, 4.83 mmol) in chlorosulfonic acid (5.34 g, 45.8 mmol) was stirred for 3 h at −10° C. Then the resulting solution was stirred for 2 h at 25° C. The reaction mixture was added to ice drop by drop, and the stirring continued. The resulting mixture was diluted with with EA (500 mL), washed with brine (3×250 mL), dried over anhydrous Na₂SO₄, the solvent was evaporated under reduced pressure to provide crude product. The crude product was dissolved in NH₄OH (15 mL, 28% wt) and stirred for 3 h at 100° C. The solvent was concentrated under reduced pressure and the pH was adjusted to 3 with 1 N HCl. The solid was collected by filtration and lyophilized to give (S)-2-acetamido-3-(4-sulfamoylphenyl) propanoic acid. MS ESI calculated for C₁₁H₁₅N₂O₅S [M+H]⁺ 287.06, found 287.05. ¹H NMR (300 MHz, DMSO-d₆) δ 8.32-8.30 (m, 1H), 7.75-7.70 (m, 2H), 7.43-7.41 (m, 2H), 7.28 (s, 2H), 4.49-4.31 (m, 1H), 3.13-3.11 (m, 1H), 2.92-2.91 (m, 1H), 1.78 (s, 3H).

[0313] Step 2: (S)-2-acetamido-3-(4-sulfamoylphenyl)propanoic acid (5.1 g, 17.81 mmol) was suspended in water (50 mL) and the pH value of the mixture was adjusted to 5 with LiOH (1 M) and adjusted to 7.5 with 0.25 M buffer. Hog kidney acylase (510 mg, 17.81 mmol) was added into the mixture at 25° C. Then the resulted mixture was stirred for 20 h at 25° C. The reaction was not further purified, the solution of (S)-2-amino-3-(4-sulfamoylphenyl)propanoic acid was directly used to the next reaction. MS ESI calculated for C₉H₁₃N₂O₄S [M+H]⁺ 245.05, found 245.10.

[0314] Step 3: To the solution of (S)-2-amino-3-(4-sulfamoylphenyl)propanoic acid (2.3 g, 9.42 mmol, dissolved in 50 mL of water) were added THF (50 mL), NaHCO₃ (3.95 g, 47.1 mmol) and Fmoc-OSu (3.18 g, 9.42 mmol) at room temperature. The resulting mixture was stirred at 25° C. for 16 h. The pH was adjusted to 3 with 1 N HCl. The reaction mixture was extracted with EA (3×120 mL). The organic layers were washed with brine (120 mL), dried over anhydrous Na₂SO₄. The solvent was concentrated under reduced pressure and the residue was purified by RP-flash with the following conditions: 330 g C¹⁸ column, 2%-2% in 5 min, 2%-30% in 30 min, ACN in water (0.05% NH₄HCO₃) to give (S)-2-((((9H-fluoren-9-yl)methoxy)carbonyl)amino)-3-(4-sulfamoylphenyl)propanoic acid. MS ESI calculated for C₂₄H₂₆N₃O₆S [M+NH₄]^{+ 484.12}, found 484.10. ¹H NMR (300 MHz, CD₃OD) δ 7.82-7.73 (m, 4H), 7.68-7.56 (m, 2H), 7.38-7.35 (m, 4H), 7.34-7.23 (m, 2H), 4.40-4.12 (m, 4H), 3.31-3.30 (m, 1H), 3.01-2.98 (m, 1H).

[chemical structure]

### (S)-5-carboxy-1-(9H-fluoren-9-yl)-N,N,N-trimethyl-3,11-dioxo-2,14,17,20,23-pentaoxa-4,10-diazapentacosan-25-aminium 2,2,2-trifluoroacetate

[0315] Step 1: To a stirred solution of tert-butyl 1-bromo-3,6,9,12-tetraoxapentadecan-15-oate (19 g, 49.3 mmol) in MeCN (100 mL) were added NaHCO₃ (12.43 g, 148 mmol) and dimethylamine hydrochloride (6.03 g, 74.0 mmol) at ambient temperature. Then the reaction mixture was stirred at 80° C. for 3 h. The reaction progress was monitored by LCMS and TLC. LCMS showed major was desired product and no SM remained. The reaction mixture was filtered and the filtrate was concentrate under reduced pressure. The residue was purified by silica gel column chromatography, eluting with gradient 0%-15% MeOH in DCM. The fractions containing desired product were combined and concentrated under reduced pressure to afford tert-butyl 2-methyl-5,8,11,14-tetraoxa-2-azaheptadecan-17-oate. MS ESI calculated for C₁₇H₃₆NO₆ [M+H]⁺ 350.25, found 350.35. ¹H-NMR (400 MHz, Chloroform-d) δ 3.91-3.88 (m, 2H), 3.73-3.69 (m, 2H), 3.67-3.66 (m, 4H), 3.65-3.64 (m, 4H), 3.63-3.61 (m, 4H), 3.11-3.08 (m, 2H), 2.74 (s, 6H), 2.52-2.49 (m, 2H), 1.45 (s, 9H).

[0316] Step 2: To a stirred solution of tert-butyl 2-methyl-5,8,11,14-tetraoxa-2-azaheptadecan-17-oate (16.5 g, 47.2 mmol) in DCM (100 mL) was added 2,2,2-trifluoroacetic acid (30 mL, 47.2 mmol) at ambient temperature. Then the reaction solution was stirred at ambient temperature for 2 h. The reaction progress was monitored by LCMS and TLC. LCMS showed major was desired product. The solvent was concentrated under reduced pressure and the residue was used directly for next step MS ESI calculated for C₁₃H₂₈NO₆ [M+H]⁺ 294.19, found 294.35.

[0317] Step 3: To a stirred solution of 2-methyl-5,8,11,14-tetraoxa-2-azaheptadecan-17-oic acid (13.77 g, 46.9 mmol) in DMF (80 mL) was added N-ethyl-N-isopropylpropan-2-amine (12.13 g, 94 mmol) at −40° C. under nitrogen atmosphere. The solution was stirred at −40° C. for 2 min. HATU (21.42 g, 56.3 mmol) and tert-butyl (((9H-fluoren-9-yl)methoxy)carbonyl)-L-lysinate (17.93 g, 42.2 mmol) were added to the solution and stirred at −40° C. for 3 h. The reaction was quenched with saturated NH₄Cl (100 mL), extracted with EtOAc (2×300 mL). The combined organic layer was washed with brine (3×80 mL), dried over anhydrous Na₂SO₄ and filtered. The filtrate was concentrated under reduced pressure and the residue was purified by RP flash with the following conditions: Column, C18 330 g, mobile phase: ACN in water (0.5% TFA), 5%-5% in 5 min, 5%-95% in 35 min; Detector, UV 254&210 nm. RT: 26 min. The collected fractions were combined and concentrated under reduced pressure to give tert-butyl (S)-23-((((9H-fluoren-9-yl)methoxy)carbonyl)amino)-2-methyl-17-oxo-5,8,11,14-tetraoxa-2,18-diazatetracosan-24-oate. MS ESI calculated for C₃₈H₅₉N₃O₉ [M+H]⁺ 700.42, found 700.40. ¹H-NMR (300 MHz, Methanol-d₄) δ 7.84-7.81 (m, 2H), 7.72-7.68 (m, 2H), 7.44-7.39 (m, 2H), 7.36-7.31 (m, 2H), 4.46-4.32 (m, 2H), 4.27-4.00 (m, 2H), 3.81-3.60 (m, 16H), 3.32-3.28 (m, 2H), 3.22-3.18 (m, 2H), 2.91 (s, 6H), 2.43 (t, J=6.3 Hz, 2H), 1.83-1.78 (m, 1H), 1.71-1.66 (m, 1H), 1.57-1.52 (m, 2H), 1.47 (s, 9H).

[0318] Step 4: To a stirred solution of tert-butyl (S)-23-((((9H-fluoren-9-yl)methoxy)carbonyl)amino)-2-methyl-17-oxo-5,8,11,14-tetraoxa-2,18-diazatetracosan-24-oate (13 g, 18.57 mmol) in MeCN (80 mL) were added NaHCO₃ (3.12 g, 37.1 mmol) and iodomethane (21.09 g, 149 mmol) at ambient temperature. Then the reaction solution was stirred at 70° C. The reaction progress was monitored by LCMS and TLC. The reaction mixture was filtered and the filtrate was concentrated under reduced pressure. The residue was used directly in next step. MS ESI calculated for C₃₉H₆₀N₃O₉[M]⁺ 714.43, found 714.41.

[0319] Step 5: To a stirred solution of (S)-5-(tert-butoxycarbonyl)-1-(9H-fluoren-9-yl)-N, N, N-trimethyl-3,11-dioxo-2,14,17,20,23-pentaoxa-4,10-diazapentacosan-25-aminium iodide (12 g, 14.25 mmol) in DCM (50 mL) was added 2,2,2-trifluoroacetic acid (30 mL, 14.25 mmol) at ambient temperature. Then the reaction solution was stirred at ambient temperature for 6 h. The reaction progress was monitored by LCMS. The reaction solution was concentrated under reduced pressure and the residue was purified by RP flash with the following conditions: Column, C18 330 g, mobile phase: ACN in water (0.5% TFA), 5%-5% in 5 min, 5%-95% in 25 min, 21% hold 8.2 min.; Detector, UV 254 nm. RT: 35 min. The collected fractions were combined and concentrated under reduced pressure to give (S)-5-carboxy-1-(9H-fluoren-9-yl)-N, N, N-trimethyl-3,11-dioxo-2,14,17,20,23-pentaoxa-4,10-diazapentacosan-25-aminium 2,2,2-trifluoroacetate. MS ESI calculated for C₃₅H₅₂N₃O₉ [M]⁺ 658.37, found 658.30. ¹H NMR (300 MHz, Methanol-d4) δ 7.82-7.79 (m, 2H), 7.70-7.66 (m, 2H), 7.42-7.29 (m, 4H), 4.39-4.35 (m, 2H), 4.26-4.23 (m, 2H), 3.93-3.88 (m, 2H), 3.72-3.52 (m, 16H), 3.20-3.17 (m, 11H), 2.43 (t, J=6.3 Hz, 2H), 1.89-1.87 (m, 1H), 1.79-1.71 (m, 1H), 1.54-1.42 (m, 4H).

[chemical structure]

### (S)-4-((((9H-fluoren-9-yl)methoxy)carbonyl)amino)-4-carboxy-N,N,N-trimethylbutan-1-aminium 2,2,2-trifluoroacetate

[0320] Step 1: To a mixture of (S)-5-amino-2-((tert-butoxycarbonyl)amino)pentanoic acid (4.6 g, 19.80 mmol) in MeOH (50 mL) were added Mel (33.7 g, 238 mmol) and KHCO₃ (1.983 g, 19.80 mmol) at ambient temperature. The resulting mixture was warmed to 50° C. and stirred for 12 h. The reaction was cooled to room temperature and filtered. The filtrate was concentrated in vacuo and the residue was dissolved in DCM (80 mL) and then filtered again. The filtrate was concentrated in vacuo to afford (S)-4-((tert-butoxycarbonyl)amino)-5-methoxy-N,N,N-trimethyl-5-oxopentan-1-aminium iodide. MS ESI calculated for C₁₄H₂₉N₂O₄ [M-I]⁺ 289.21, found 289.35.

[0321] Step 2: To a mixture of (S)-4-((tert-butoxycarbonyl)amino)-5-methoxy-N,N,N-trimethyl-5-oxopentan-1-aminium iodide (7.4 g, 16.00 mmol) in MeOH (48 mL) and THF (24 mL) was added LiOH (48.0 mL, 48.0 mmol, 1 M in water) at ambient temperature. The reaction was stirred at ambient temperature for 2 h then concentrated in vacuo. Then 48 mL 1 N HCl was added. The solvent was concentrated in vacuo to afford (S)-4-((tert-butoxycarbonyl)amino)-4-carboxy-N,N,N-trimethylbutan-1-aminium chloride. MS ESI calculated for C₁₃H₂₇N₂O₄ [M-Cl]⁺ 275.20, found 275.20.

[0322] Step 3: To a mixture of (S)-4-((tert-butoxycarbonyl)amino)-4-carboxy-N,N,N-trimethylbutan-1-aminium chloride (7.5 g, 14.48 mmol) in DCM (50 mL) was added TFA (25 mL, 324 mmol) at ambient temperature. The reaction was stirred at ambient temperature for 1 h then concentrated in vacuo to afford (S)-4-amino-4-carboxy-N,N,N-trimethylbutan-1-aminium 2,2,2-trifluoroacetate. MS ESI calculated for C₈H₁₉N₂O₂ [M-CF₃COO]⁺ 175.14, found 175.20.

[0323] Step 4: To a mixture of (S)-4-amino-4-carboxy-N,N,N-trimethylbutan-1-aminium 2,2,2-trifluoroacetate (10 g, 13.88 mmol) in THF (30 mL) and water (30 mL) were added NaHCO₃ (9.33 g, 111 mmol) and Fmoc-OSu (4.21 g, 12.49 mmol) at ambient temperature. The reaction was stirred at ambient temperature for 2 h. The resulting solution was acidified with aqueous HCl to pH 3-4 and then filtered. The filtrate was purified by Rp-flash with the following conditions: Column: Flash C¹⁸ (330 g); Mobile Phase A: water (0.05% TFA), Mobile Phase B: ACN; (Gradient: 0% B hold 5 min, up to 33% B within 18 min, 33% B hold 7 min; up to 95% B within 5 min, 95% B hold 5 min); Flow rate: 90 mL/min; Detector: UV 210 nm; RT=40 min. The product-containing fractions were collected and lyophilized to afford (S)-4-((((9H-fluoren-9-yl)methoxy)carbonyl)amino)-4-carboxy-N,N,N-trimethylbutan-1-aminium 2,2,2-trifluoroacetate. MS ESI calculated for C₂₃H₂₉N₂O₄ [M-CF₃COO]⁺ 397.21, found 397.15. ¹H NMR (400 MHz, DMSO-d₆) δ 12.85 (br, 1H), 7.92-7.89 (m, 2H), 7.74-7.63 (m, 3H), 7.44-7.40 (m, 2H), 7.33-7.31 (m, 2H), 4.38-4.22 (m, 3H), 4.02-3.98 (m, 1H), 3.34-3.20 (m, 2H), 3.09 (s, 9H), 1.79-1.51 (m, 4H). ¹⁹F-NMR (376 MHz, DMSO-d₆) −73.64.

[chemical structure]

[chemical structure]

### (S)-2-((((9H-fluoren-9-yl)methoxy)carbonyl)amino)-3-(4-((1s,4R)-4-(tert-butoxycarbonyl)cyclohexyl)phenyl)propanoic acid

[0324] Step 1: To a mixture of tert-butyl 4-(4,4,5,5-tetramethyl-1,3,2-dioxaborolan-2-yl) cyclohex-3-ene-1-carboxylate (29.5 g, 96 mmol) in THF (30 mL) were added methyl (S)-2-((tert-butoxycarbonyl) amino)-3-(4-iodophenyl) propanoate (15.5 g, 38.2 mmol), and Pd(Ph₃P)₄ (2.210 g, 1.912 mmol) at room temperature. The reaction was warmed to 60° C. for 4 h. The resulting solution was quenched with water (100 mL) and extracted with ethyl acetate (3×300 mL). The organic layers were combined, washed with brine (2×200 mL), dried over anhydrous sodium sulfate and filtered. The filtrate was concentrated in vacuo to afford crude product. The residue was purified by silica gel chromatography, eluting with a gradient of ethyl acetate: petroleum ether—0:1 to 1:4 to afford tert-butyl 4′-((S)-2-((tert-butoxycarbonyl)amino)-3-methoxy-3-oxopropyl)-2,3,4,5-tetrahydro-[1,1′-biphenyl]-4-carboxylate. MS ESI calculated for C₂₆H₃₈NO₆Na [M+Na]⁺, 482.26 found 482.10.

[0325] Step 2: To a mixture of tert-butyl 4′-((S)-2-((tert-butoxycarbonyl)amino)-3-methoxy-3-oxopropyl)-2,3,4,5-tetrahydro-[1,1′-biphenyl]-4-carboxylate (16 g, 34.8 mmol) in methanol (160 mL) was added Pd—C (10% on carbon, wetted with ca. 55% water, 5.3 g, 4.98 mmol) at room temperature. The mixture was degassed with H₂ three times and stirred for 1 h at room temperature under the atmosphere of H₂ (1.5 atm). The resulting mixture was filtered. The filtrate was concentrated in vacuo to afford tert-butyl(S)-4-(4-(2-((tert-butoxycarbonyl) amino)-3-methoxy-3-oxopropyl)phenyl)cyclohexane-1-carboxylate. MS ESI calculated for C₂₆H₄₁NO₆ [M+H]⁺, 462.28, found 462.30.

[0326] Step 3: To a stirred solution of tert-butyl(S)-4-(4-(2-((tert-butoxycarbonyl) amino)-3-methoxy-3-oxopropyl)phenyl)cyclohexane-1-carboxylate (15 g, 32.5 mmol) in THF (300 mL) was added LiOH (65.0 mL, 65.0 mmol) at room temperature. The solution was stirred at 20° C. for 1 h. The pH value of the solution was adjusted to 3 with 1 N HCl. The reaction was concentrated under reduced pressure to give (S)-2-((tert-butoxycarbonyl)amino)-3-(4-(4-(tert-butoxycarbonyl)cyclohexyl)phenyl)propanoic acid. MS ESI calculated for C₂₅H₃₈NO₆Na [M+Na]⁺, 470.26, found 470.30.

[0327] Step 4: The (S)-2-((tert-butoxycarbonyl)amino)-3-(4-(4-(tert-butoxycarbonyl) cyclohexyl) phenyl) propanoic acid (14 g, 31.3 mmol) was separated with Prep-SFC with following conditions: Column: CHIRAL ART Cellulose-SB, 3×25 cm, 5 μm; Mobile Phase A: CO₂, Mobile Phase B: MeOH (0.1% 2M NH₃-MEOH); Flow rate: 80 mL/min; Gradient: 10% B; 220 nm; RT1: 7.45; RT2: 8.38; Injection Volume: 1.3 ml; Number Of Runs: 131; to afford (S)-2-((tert-butoxycarbonyl) amino)-3-(4-((1s,4R)-4-(tert-butoxycarbonyl) cyclohexyl) phenyl) propanoic acid (fast-eluting peak). MS ESI calculated for C₂₅H₃₈NO₆Na [M+Na]⁺, 470.26 found 470.30. 1H NMR (300 MHz, Chloroform-d) δ 7.11 (d, J=3.0 Hz, 4H), 4.27 (s, 1H), 3.18-3.12 (m, 1H), 2.91 (s, 1H), 2.60 (s, 1H), 2.49 (s, 1H), 2.20 (d, J=10.9 Hz, 2H), 1.78-1.52 (m, 6H), 1.49 (d, J=0.7 Hz, 9H), 1.36 (s, 9H).

[0328] As a slow-eluting peak, (S)-2-((tert-butoxycarbonyl)amino)-3-(4-((1r,4S)-4-(tert-butoxycarbonyl)cyclohexyl)phenyl)propanoic acid was isolated. MS ESI calculated for C₂₅H₃₈NO₆Na [M+Na]⁺, 470.26 found 470.30. 1H NMR (300 MHz, Chloroform-d) δ 7.14-7.06 (m, 4H), 4.25 (s, 1H), 3.14 (d, J=12.3 Hz, 1H), 2.88 (s, 1H), 2.49-2.41 (m, 1H), 2.29-2.15 (m, 1H), 2.05 (d, J=12.2 Hz, 2H), 1.90 (d, J=12.1 Hz, 2H), 1.69-1.47 (m, 2H), 1.47 (s, 11H), 1.34 (s, 9H).

[0329] Step 5: To a mixture of (S)-2-((tert-butoxycarbonyl) amino)-3-(4-((1s,4R)-4-(tert-butoxycarbonyl) cyclohexyl) phenyl) propanoic acid (8.3 g, 18.54 mmol) in THF (80 mL) was added hydrogen chloride (M/dioxane) (9.27 mL, 18.54 mmol) in portions at room temperature. The reaction was concentrated under reduced pressure to afford (S)-2-amino-3-(4-((1s,4R)-4-(tert-butoxycarbonyl)cyclohexyl) phenyl)propanoic acid. MS ESI calculated for C₂₀H₃₀NO₄ [M+H]⁺, 348.21 found 348.25.

[0330] Step 6: To a stirred solution of (S)-2-amino-3-(4-((1s,4R)-4-(tert-butoxycarbonyl) cyclohexyl) phenyl) propanoic acid (6 g, 17.27 mmol) and NaHCO₃ (7.25 g, 86 mmol) in THF (60 mL) and water (60.0 mL) was added n-(9-fluorenylmethoxycarbonyloxy)succinimide (5.24 g, 15.54 mmol) at room temperature. The mixture was stirred at room temperature for 1 h. The pH value of the solution was adjusted to 3 with 1 N HCl. The aqueous phase was extracted with ether acetate (2×200 mL). The combined organic layer was washed with brine (150 mL), dried over anhydrous Na₂SO₄ and filtered. The filtrate was concentrated under reduced pressure, and the residue was purified by RP flash to give (S)-2-((((9H-fluoren-9-yl)methoxy)carbonyl)amino)-3-(4-((1s,4R)-4-(tert-butoxycarbonyl)cyclohexyl)phenyl)propanoic acid. MS ESI calculated for C₃₅H₄₁NO₆ [M+H]⁺, 570.28 found 570.15. ¹H NMR (300 MHz, Methanol-d₄) δ 7.81 (d, J=7.5 Hz, 2H), 7.61 (d, J=7.5 Hz, 2H), 7.43-7.27 (m, 4H), 7.16 (d, J=7.8 Hz, 2H), 7.07 (d, J=7.9 Hz, 2H), 4.45-4.33 (m, 2H), 4.22-4.06 (m, 2H), 3.26-3.14 (m, 1H), 2.96-2.88 (m, 1H), 2.59 (s, 1H), 2.48 (s, 1H), 2.15 (s, 2H), 1.61 (d, J=5.5 Hz, 6H), 1.49 (s, 9H).

[chemical structure]

### (S)-2-((((9H-fluoren-9-yl)methoxy)carbonyl)amino)-3-(4-((1r,4S)-4-(tert-butoxycarbonyl)cyclohexyl)phenyl)propanoic acid

[0331] Step 1: To a mixture of tert-butyl 4-(4,4,5,5-tetramethyl-1,3,2-dioxaborolan-2-yl)cyclohex-3-ene-1-carboxylate (18.25 g, 59.2 mmol) in THF (200 mL) were added methyl (S)-2-((tert-butoxycarbonyl)amino)-3-(4-iodophenyl)propanoate (20 g, 49.4 mmol), Pd(PPh₃)₄(2.85 g, 2.468 mmol) and CsF (30.0 g, 197 mmol) under argon. The reaction was stirred at 60° C. for 16 h under argon. The reaction was quenched with water (150 mL) and extracted with EA (3×500 mL). The combined organic layers were dried over anhydrous MgSO₄ and filtered. The residue was purified by silica gel chromatography, eluting with a gradient of ethyl acetate: petroleum ether—0:1 to 1:5 to afford tert-butyl 4′-((S)-2-((tert-butoxycarbonyl)amino)-3-methoxy-3-oxopropyl)-2,3,4,5-tetrahydro-[1,1′-biphenyl]-4-carboxylate. MS ESI calculated for C₂₆H₃₇NO₆Na [M+Na]⁺ 482.26, found 482.30.

[0332] Step 2: To a mixture of tert-butyl (R)-4′-((S)-2-((tert-butoxycarbonyl)amino)-3-methoxy-3-oxopropyl)-2,3,4,5-tetrahydro-[1,1′-biphenyl]-4-carboxylate (21 g, 45.7 mmol) in dichloromethane (200 mL) was added Crabtree's catalyst (14.71 g, 18.28 mmol) under argon. The suspension was degassed under vacuum and purged with H₂ several times, the reaction solution was stirred for 24 h at room temperature under 2 atm H₂. The reaction was filtered. The filtrate was concentrated in vacuo to afford racemic product. The racemic product was separated with a Prep-SFC Column: CHIRALPAK IG, 5*25 cm, 10 m; Mobile Phase A: CO₂, Mobile Phase B: MeOH (0.1% 2M NH₃-MeOH); Flow rate: 200 mL/min; Gradient: isocratic 25% B; Column Temperature (° C.): 35; Back Pressure (bar): 100; Wave Length: 220 nm; RT1(min): 4.15 to afford tert-butyl (1S,4R)-4-(4-((S)-2-((tert-butoxycarbonyl)amino)-3-methoxy-3-oxopropyl)phenyl)cyclohexane-1-carboxylate as an orange oil. MS ESI calculated for C₂₆H₃₉NO₆Na [M+Na]⁺ 484.28, found 484.35.

[0333] Step 3: To a mixture of tert-butyl (1S,4R)-4-(4-((S)-2-((tert-butoxycarbonyl)amino)-3-methoxy-3-oxopropyl)phenyl)cyclohexane-1-carboxylate (10.5 g, 22.75 mmol) in THF (45.5 mL) was added LiOH (1M in water) (45.5 mL, 45.5 mmol) at ambient temperature. The reaction was stirred at ambient temperature for 2 h. The resulting solution was acidified with aqueous HCl (1M) and extracted with EA (4×100 mL). The combined organic layers were dried over anhydrous MgSO₄ and filtered. The filtrate was concentrated in vacuo to afford (S)-2-((tert-butoxycarbonyl)amino)-3-(4-((1R,4S)-4-(tert-butoxycarbonyl)cyclohexyl)phenyl)propanoic acid. MS ESI calculated for C₂₅H₃₇NO₆Na [M+Na]⁺ 470.26, found 470.25.

[0334] Step 4: To a mixture of (S)-2-((tert-butoxycarbonyl)amino)-3-(4-((1R,4S)-4-(tert-butoxycarbonyl)cyclohexyl)phenyl)propanoic acid (9.5 g, 21.23 mmol) in THF (100 mL) was added HCl (4M in 1,4dioxane) (100 mL, 400 mmol) at ambient temperature. The reaction was stirred at ambient temperature for 4 h. The resulting solution was concentrated in vacuo to afford (S)-2-amino-3-(4-((1R,4S)-4-(tert-butoxycarbonyl)cyclohexyl)phenyl)propanoic acid. MS ESI calculated for C₂₀H₃₀NO₄ [M+H]⁺ 348.21, found 348.25.

[0335] Step 5: To a mixture of (S)-2-amino-3-(4-((1R,4S)-4-(tert-butoxycarbonyl)cyclohexyl)phenyl)propanoic acid (7 g, 20.15 mmol) in THF (30 mL) and water (30 mL) were added sodium bicarbonate (8.46 g, 101 mmol) and n-(9-fluorenylmethoxycarbonyloxy)succinimide (6.12 g, 18.13 mmol). The reaction was stirred at ambient temperature for 2 h. The resulting solution was acidified with aqueous HCl (1 M) and extracted with EA (5×100 mL). The combined organic layers were dried over anhydrous MgSO₄ and filtered. The filtrate was concentrated in vacuo to afford crude product. The residue was purified by RP flash with the following conditions: Column: Flash C 18 (330 g); Mobile Phase A: water (0.05% TFA), Mobile Phase B: ACN; (Gradient: 2% B hold 5 min, up to 75% B within 15 min, 76.5% B hold 6 min; up to 95% B within 5 min, 95% B hold 5 min); Flow rate: 90 mL/min; Detector: UV 210 nm; RT=31 min. The product-containing fractions were collected and concentrated in vacuo to give (S)-2-((((9H-fluoren-9-yl)methoxy)carbonyl)amino)-3-(4-((1R,4S)-4-(tert-butoxycarbonyl)cyclohexyl)phenyl)propanoic acid. MS ESI calculated for C₃₅H₄₀NO₆ [M+H]⁺ 570.29, found 570.25. ¹H NMR (400 MHz, methanol-d₄) δ 7.80-7.78 (m, 2H), 7.60-7.58 (m, 2H), 7.40-7.38 (m, 2H), 7.37-7.28 (m, 2H), 7.16-7.14 (m, 2H), 7.06-7.04 (m, 2H), 4.45-4.41 (m, 1H), 4.32-4.28 (m, 1H), 4.15-4.055 (m, 2H), 3.21-3.17 (m, 1H), 2.91-2.88 (m, 1H), 2.41-2.37 (m, 1H), 2.19-2.17 (m, 1H), 1.96-1.91 (m, 2H), 1.78-1.75 (m, 2H), 1.45-1.42 (m, 10H), 1.40-1.32 (m, 3H).

[chemical structure]

### (S)-2-((((9H-fluoren-9-yl)methoxy)carbonyl)-λ²-azaneyl)-3-(4-(5-oxo-4,5-dihydro-1,2,4-oxadiazol-3-yl)phenyl)propanoic acid

[0336] Step 1: To a mixture of (S)-2-((tert-butoxycarbonyl)amino)-3-(4-cyanophenyl)propanoic acid (5 g, 17.22 mmol) in DCM (10 mL) was added tert-butyl N,N-diisopropylcarbamimidate (17.25 g, 86 mmol). The reaction was refluxed at 40° C. for 2 h. The resulting solution was concentrated under vacuum. The residue was purified by silica gel chromatography, eluting with a gradient of ethyl acetate: petroleum ether—0:1 to 1:3 to afford tert-butyl (S)-2-((tert-butoxycarbonyl) amino)-3-(4-cyanophenyl)propanoate. MS ESI calculated for C₁₉H₂₆N₂O₄Na [M+Na]⁺ 369.19, found 369.10.

[0337] Step 2: Sodium bicarbonate (10.91 g, 130 mmol) was added to a solution of hydroxylamine hydrochloride (6.62 g, 95 mmol) in DMSO (120 mL) at room temperature and then the temperature was increased to 45-50° C. At this temperature, tert-butyl (S)-2-((tert-butoxycarbonyl) amino)-3-(4-cyanophenyl) propanoate (6 g, 17.32 mmol) was added to the resulting solution and the mixture was heated up to 100° C. followed by stirring at the same temperature for 18 h. After completion, the reaction mass was cooled to 15-20° C., then poured into water. The solution was stirred for 15-20 min at 15-20° C. and filtered. The collected solid was washed with water and dried to give tert-butyl (S,E)-2-((tert-butoxycarbonyl) amino)-3-(4-(N-hydroxycarbamimidoyl) phenyl)propanoate. MS ESI calculated for C₁₉H₃₀N₃O₅ [M+H]⁺ 380.21, found 380.15.

[0338] Step 3: tert-butyl (S,E)-2-((tert-butoxycarbonyl)amino)-3-(4-(N-hydroxycarbamimidoyl)phenyl)propanoate (5.5 g, 14.49 mmol) was dissolved in t-butanol (100 mL), then BOC₂O (3.37 mL, 14.49 mmol) was added slowly through an addition funnel at 25-30° C. After completion of addition, the temperature was increased to 50-55° C. and stirring was continued at the same temperature for 12 h. After completion of reaction, the reaction mixture was cooled to 15-20° C. and stirred for 60 min at 15-20° C. to obtain the solid. The product was filtered, washed with tertiary-butanol and dried under vacuum at 55-60° C. to afford the crude product. MS ESI calculated for C₂₄H₃₈N₃O₇ [M+H]⁺ 480.26, found 480.35.

[0339] Step 4: tert-butyl (S,E)-3-(4-(N-(tert-butoxycarbonyl)-N-hydroxycarbamimidoyl)phenyl)-2-((tert-butoxycarbonyl)amino)propanoate (5.5 g, 11.47 mmol) was dissolved in DMF (60 mL) and then the reaction was heated up to 110-115° C. The resulting solution was stirred at the same temperature for 12 h. The reaction mixture was cooled to room temperature and diluted with 600 mL EtOAc and washed with aqueous saturated NaCl (4×100 mL), dried over Na₂SO₄, filtered. The filtrate was concentrated under reduced pressure. The residue was purified by silica gel column chromatography, eluting with gradient 0%-70% EtOAc in PE. The fractions containing desired product were combined and concentrated under reduced pressure to afford tert-butyl (S)-2-((tert-butoxycarbonyl)amino)-3-(4-(5-oxo-4,5-dihydro-1,2,4-oxadiazol-3-yl) phenyl) propanoate. MS ESI calculated for C₂₀H₂₈N₃O₆ [M+H]⁺ 406.19, found 406.10. ¹H NMR (400 MHz, DMSO-d₆) δ 12.91 (s, 1H), 7.73-7.72 (m, 2H), 7.48-7.43 (m, 2H), 7.26-7.24 (m, 1H), 4.07-4.05 (m, 1H), 3.03-3.01 (m, 1H), 2.95-2.89 (m, 1H), 1.33 (s, 9H), 1.32 (s, 9H).

[0340] Step 5: To a mixture of tert-butyl (S)-2-((tert-butoxycarbonyl)amino)-3-(4-(5-oxo-4,5-dihydro-1,2,4-oxadiazol-3-yl)phenyl)propanoate (4 g, 9.87 mmol) in DCM (40 mL) was added TFA (40 mL, 519 mmol) under argon at room temperature. The reaction was stirred at room temperature for 1 h. The mixture was concentrated under reduced pressure to afford the crude product. MS ESI calculated for C₁₁H₁₂N₃O₄ [M+H]⁺ 250.07, found 249.95.

[0341] Step 6: To a mixture of (S)-2-amino-3-(4-(5-oxo-4,5-dihydro-1,2,4-oxadiazol-3-yl)phenyl)propanoic acid (2.1 g, 8.43 mmol) in THF (20 mL) and H₂O (20 mL) were added sodium bicarbonate (3.54 g, 42.1 mmol) and N-(9-fluorenylmethoxycarbonyloxy)succinimide (2.56 g, 7.58 mmol) under argon at room temperature. The reaction was stirred at room temperature for 1 h. The pH value of the solution was adjusted to 4 with 1 N HCl. The aqueous phase was extracted with ethyl acetate (2×200 mL). The combined organic layer was washed with brine (3×50 mL), dried over anhydrous Na₂SO₄ and filtered. The filtrate was concentrated under reduced pressure and the residue was purified by RP flash with the following conditions: Column: AQ 18 gel column (330 g), 20-35 m; Mobile Phase A: 5 mM aq. TFA; Mobile Phase B: MeCN; (Gradient: 0% B hold 5 min, up to 55.3% B within 35 min, 55.3% B hold 3.2 min; up to 95% B within 2 min, 95% B hold 10 min); Flow rate: 60 mL/min; Detector: UV 254 & 210 nm; RT: 35.32 min. The fractions containing desired product were combined and concentrated under reduced pressure to give (S)-2-((((9H-fluoren-9-yl)methoxy)carbonyl)amino)-3-(4-(5-oxo-4,5-dihydro-1,2,4-oxadiazol-3-yl)phenyl)propanoic acid. MS ESI calculated for C₂₆H₂₀N₃O₆ [M−H]⁺ 470.14, found 470.15. ¹H NMR (400 MHz, DMSO-d₆) δ 12.91 (s, 1H), 12.82 (s, 1H), 7.93-7.87 (m, 2H), 7.78-7.72 (m, 3H), 7.68-7.62 (m, 2H), 7.51-7.30 (m, 4H), 7.28-7.26 (m, 2H), 4.27-4.15 (m, 4H), 3.20-3.12 (m, 1H), 2.99-2.92 (m, 1H).

[chemical structure]

### (2S,3S)-2-((((9H-fluoren-9-yl)methoxy)carbonyl)amino)-3-(3-chloronaphthalen-1-yl)butanoic acid

[0342] Step 1: To a mixture of tert-butyl 2-oxobutanoate (80.0 g, 506 mmol, 1.00 eq) and K₂CO₃ (210 g, 1520 mmol, 3.00 eq) in toluene (2.40 L) were added 1-bromo-3-chloronaphthalene, P(t-Bu)₃·HBF₄ (11.7 g, 40.5 mmol, 0.08 eq) and the mixture was purged with N₂ for three times. Pd₂(dba)₃ (9.26 g, 10.1 mmol, 0.02 eq) was added and the reaction mixture was purged with N₂ three times, and stirred at 110° C. for 3 h under N₂. The reaction mixture was cooled to room temperature, poured into aq. NH₄Cl (3.00 L) and extracted with EtOAc (2.00 L×2). The organic layers were combined, washed with brine, dried over Na₂SO₄, filtered and concentrated under reduced pressure. The crude product was purified by silica chromatography (SiO₂, petroleum ether/ethyl acetate=1/0 to 0/1).

[0343] Step 2: To a mixture of tert-butyl 3-(3-chloronaphthalen-1-yl)-2-oxobutanoate (100 g, 314 mmol, 1.00 eq) in DCM (1.00 L) at 0° C. was dropwise added TFA (1.00 L), and the mixture was stirred for 2 h at ambient temperature. The reaction mixture was concentrated and the crude product was purified by prep-HPLC (column: Phenomenex luna C18 (250*70 mm, 15 um); mobile phase: [H₂O (0.1% TFA)-ACN]; gradient: 35%-65% B over 20.0 min).

[0344] Step 3: To a mixture of lysine (114 g, 779 mmol, 3.10 eq) in DMSO (270 mL) and Na₂B₄O₇ (0.1M, 561 mL) at 20° C. was added Na₂B₄O₇·10H₂O (28.8 g, 75.4 mmol, 0.30 eq) followed by compound 3-(3-chloronaphthalen-1-yl)-2-oxobutanoic acid (66.0 g, 251 mmol, 1.00 eq). Pyridoxal phosphate (2.44 g, 9.85 mmol, 0.05 eq) and transaminase enzyme Prozomix TAm-248 (35.0 g) were added to the reaction mixture at 35° C. The reaction mixture was stirred at 45° C. for 12 h. The reaction mixture was cooled to 20° C., adjusted to pH=5.0 with 5 N HCl (60.0 mL), and stirred at 20° C. for 1 hr. The mixture was filtered and the filter cake washed with H₂O (500 mL×3), and dried under reduced pressure to provide (2S,3S)-2-amino-3-(3-chloronaphthalen-1-yl)butanoic acid, used in the next step without purification.

[0345] Step 4: To a mixture of (2S,3S)-2-amino-3-(3-chloronaphthalen-1-yl)butanoic acid (54.0 g, 205 mmol, 1.00 eq) in EtOAc (540 mL) were added DIPEA (39.7 g, 307 mmol, 1.50 eq) and (9H-fluoren-9-yl)methyl (2,5-dioxopyrrolidin-1-yl) carbonate (82.9 g, 246 mmol, 1.20 eq) and the mixture was stirred for 12 h. The precipitate was filtered off and the filtrate washed with 2.0 L of EtOAc. The filtrate was concentrated to obtain the crude product, which was purified by prep-HPLC (column: Phenomenex luna C18 250*150 mm*15 um; mobile phase: [H₂O (0.04% HCl)-ACN]; gradient: 50%-95% B over 25.0 min). ¹H NMR: (400 MHz, DMSO-d₆) δ 12.8 (s, 1H), 8.22 (d, J=8.2 Hz, 1H), 7.84-8.01 (m, 5H), 7.53-7.72 (m, 4H), 7.31-7.47 (m, 3H), 7.18-7.30 (m, 2H), 4.54 (t, J=8.8 Hz, 1H), 4.21-4.32 (m, 1H), 3.95-4.19 (m, 3H), 3.82 (s, 3H), 1.36 (d, J=6.8 Hz, 3H).

[chemical structure]

### (2S,3S)-2-((((9H-fluoren-9-yl)methoxy)carbonyl)amino)-3-(3-methoxynaphthalen-1-yl)butanoic acid

[0346] The title compound was obtained from appropriate starting materials using a process similar to the synthesis of SbMe1Nal3Cl. ¹H NMR: (400 MHz, DMSO-d₆) δ 12.77 (s, 1H), 8.10 (d, J=8.2 Hz, 1H), 7.84 (t, J=8.8 Hz, 4H), 7.60 (d, J=7.4 Hz, 1H), 7.55 (d, J=7.4 Hz, 1H), 7.34-7.50 (m, 4H), 7.13-7.29 (m, 3H), 7.05 (s, 1H), 4.53 (t, J=8.2 Hz, 1H), 4.18-4.32 (m, 1H), 4.07-4.17 (m, 2H), 3.93-4.01 (m, 1H), 3.82 (s, 3H), 1.33 (d, J=6.8 Hz, 3H).

[chemical structure]

### (2S,3S)-2-((((9H-fluoren-9-yl)methoxy)carbonyl)amino)-3-(3-methylnaphthalen-1-yl)butanoic acid

[0347] The title compound was obtained from appropriate starting materials using a process similar to the synthesis of SbMe1Nal3Cl. ¹H NMR: (400 MHz, DMSO-d₆) δ 8.24 (d, J=6.8 Hz, 1H), 7.83-7.90 (m, 2H), 7.77-7.82 (m, 1H), 7.57-7.64 (m, 1H), 7.50-7.56 (m, 2H), 7.34-7.49 (m, 5H), 7.18-7.30 (m, 3H), 4.43 (t, J=7.6 Hz, 1H), 4.22-4.31 (m, 1H), 4.08-4.17 (m, 2H), 3.95-4.04 (m, 1H), 2.40 (s, 3H), 1.32 (d, J=6.8 Hz, 3H).

[chemical structure]

### (2S,3S)-2-((((9H-fluoren-9-yl)methoxy)carbonyl)amino)-3-(8-fluoronaphthalen-1-yl)butanoic acid

[0348] The title compound was obtained from appropriate starting materials using a process similar to the synthesis of SbMe1Nal3Cl. ¹H NMR: (400 MHz, DMSO-d₆) δ 7.84 (d, J=7.5 Hz, 3H), 7.78 (d, J=8.1 Hz, 1H), 7.71 (d, J=7.0 Hz, 1H), 7.57 (d, J=7.3 Hz, 1H), 7.43-7.53 (m, 4H), 7.33-7.41 (m, 2H), 7.17-7.33 (m, 3H), 4.49 (s, 1H), 4.19-4.37 (m, 2H), 4.04-4.09 (m, 2H), 1.32 (d, J=6.6 Hz, 3H).

[chemical structure]

[chemical structure]

### (S)-2-((((9H-fluoren-9-yl)methoxy)carbonyl)amino)-3-(4-(5-methyl-1,2,4-oxadiazol-3-yl)phenyl)propanoic acid

[0349] Step 1: To a stirred solution of (S)-2-((tert-butoxycarbonyl)amino)-3-(4-cyanophenyl)propanoic acid (20.0 g, 68.9 mmol) in DCM (200 mL) was added tert-butyl (E)-N,N′-diisopropylcarbamimidate (69.0 g, 344 mmol) at room temperature. The reaction mixture was stirred at 40° C. for 5 h. The reaction mixture was concentrated under reduced pressure. The crude compound was purified by Biotage-isolera using silica column and the compound eluted with 30% of ethyl acetate in petroleum ether. Pure fractions were combined and concentrated under reduced pressure to afford tert-butyl (S)-2-((tert-butoxycarbonyl)amino)-3-(4-cyanophenyl)propanoate. MS ESI calculated for C₁₉H₂₆N₂O₄ [M−H]⁺ 345.19, found 345.25.

[0350] Step 2: To a stirred solution of hydroxylammoniumchloride (21.0 g, 302 mmol) in DMSO (400 mL) was added sodium bicarbonate (34.6 g, 411 mmol) at room temperature. Then tert-butyl (S)-2-((tert-butoxycarbonyl)amino)-3-(4-cyanophenyl)propanoate (19.0 g, 54.8 mmol) was added to the reaction mixture at 45-50° C. The reaction mixture was stirred at 100° C. for 18 h. The reaction mixture was cooled to 15-20° C., quenched with water and stirred at 15-20° C. for 15-20 min. The compound was filtered, washed with water and diethyl ether and dried under vacuum to afford tert-butyl (S,E)-2-((tert-butoxycarbonyl)amino)-3-(4-(N-hydroxycarbamimidoyl)phenyl)propanoate. MS ESI calculated for C₁₉H₂₉N₃O₅ [M+H]⁺ 380.21, found 380.29.

[0351] Step 3: A solution of tert-butyl (S,E)-2-((tert-butoxycarbonyl)amino)-3-(4-(N-hydroxycarbamimidoyl)phenyl)propanoate (19.0 g, 50.1 mmol) in triethyl orthoacetate (190 mL) was stirred at 150° C. for 5 h. The reaction mixture was concentrated under reduced pressure. The crude compound was purified by Biotage-isolera using a silica column and the compound eluted with 30% of ethyl acetate in petroleum ether. Pure fractions were combined and concentrated under reduced pressure to afford tert-butyl (S)-2-((tert-butoxycarbonyl)amino)-3-(4-(5-methyl-1,2,4-oxadiazol-3-yl)phenyl)propanoate. MS ESI calculated for C₂₁H₂₉N₃O₅ [M+H]⁺ 402.21, found 402.29.

[0352] Step 4: To a stirred solution of tert-butyl (S)-2-((tert-butoxycarbonyl)amino)-3-(4-(5-methyl-1,2,4-oxadiazol-3-yl)phenyl)propanoate (8.00 g, 19.8 mmol) in DCM (80 mL) was added TFA (80.0 mL, 1.04 mol) at 0° C. The reaction mixture was stirred at 24° C. for 8 h. The reaction mixture was concentrated under reduced pressure. The crude compound was triturated with diethyl ether and dried under reduced pressure to afford (S)-2-amino-3-(4-(5-methyl-1,2,4-oxadiazol-3-yl)phenyl)propanoic acid. MS ESI calculated for C₁₂H₁₃N₃O₃ [M+H]⁺ 248.10, found 248.07.

[0353] Step 5: To a stirred solution of (S)-2-amino-3-(4-(5-methyl-1,2,4-oxadiazol-3-yl)phenyl)propanoic acid (4.50 g, 18.2 mmol) in THF (50 mL) and water (50 mL) were added sodium bicarbonate (7.64 g, 91.0 mmol) and (9H-fluoren-9-yl)methyl (2,5-dioxopyrrolidin-1-yl) carbonate (5.53 g, 16.4 mmol) at room temperature. The reaction mixture was stirred at 25° C. for 2 h. The reaction mixture was acidified with 1 N HCl (pH ˜4) and extracted with ethyl acetate (2×300 mL). The combined organic layer was washed with brine (200 mL), dried over Na₂SO₄, filtered and concentrated under reduced pressure. The crude compound was purified by reverse phase flash chromatography (conditions: Column: C18 gel column (100 g) Mobile Phase A: Water; Mobile Phase B: Acetonitrile) and the compound eluted with a gradient of 45-100% acetonitrile in water. Pure fractions were combined and concentrated under reduced pressure to afford (S)-2-((((9H-fluoren-9-yl)methoxy)carbonyl)amino)-3-(4-(5-methyl-1,2,4-oxadiazol-3-yl)phenyl)propanoic acid. MS ESI calculated for C₂₇H₂₃N₃O₅ [M+H]⁺ 470.16, found 470.25. ¹H NMR (400 MHz, DMSO-d₆): δ (ppm) 12.85 (br s, 1H), 7.88 (t, J=8.0 Hz, 4H), 7.50-7.76 (m, 3H), 7.35-7.47 (m, 4H), 7.24-7.33 (m, 2H), 4.10-4.30 (m, 4H), 3.16 (dd, J=13.8 Hz, 4.2 Hz, 1H), 2.90-3.00 (m, 1H), 2.66 (s, 3H).

[chemical structure]

[chemical structure]

### (S)-2-((((9H-fluoren-9-yl)methoxy)carbonyl)amino)-3-(4-(5-methyl-1,2,4-oxadiazol-3-yl)phenyl)propanoic acid

[0354] Step 1: To a stirred solution of (S)-2-((tert-butoxycarbonyl)amino)-3-(4-cyanophenyl)propanoic acid (20.0 g, 68.9 mmol) in DCM (200 mL) was added tert-butyl (E)-N,N′-diisopropylcarbamimidate (69.0 g, 344 mmol) at room temperature. The reaction mixture was stirred at 40° C. for 5 h. The reaction mixture was concentrated under reduced pressure. The crude compound was purified by Biotage-isolera using a silica column and the compound eluted with 30% of ethyl acetate in petroleum ether. Pure fractions were combined and concentrated under reduced pressure to afford tert-butyl (S)-2-((tert-butoxycarbonyl)amino)-3-(4-cyanophenyl)propanoate. MS ESI calculated for C₁₉H₂₆N₂O₄ [M−H]⁺ 345.19, found 345.25.

[0355] Step 2: To a stirred solution of hydroxylammoniumchloride (21.0 g, 302 mmol) in DMSO (400 mL) was added sodium bicarbonate (34.6 g, 411 mmol) at room temperature. Then tert-butyl (S)-2-((tert-butoxycarbonyl)amino)-3-(4-cyanophenyl)propanoate (19.0 g, 54.8 mmol) was added to the reaction mixture at 45-50° C. The reaction mixture was stirred at 100° C. for 18 h. The reaction mixture was cooled to 15-20° C., quenched with water and stirred at 15-20° C. for 15-20 min. The compound was filtered, washed with water and diethyl ether and dried under vacuum to afford tert-butyl (S,E)-2-((tert-butoxycarbonyl)amino)-3-(4-(N-hydroxycarbamimidoyl)phenyl)propanoate (as a white solid. MS ESI calculated for C₁₉H₂₉N₃O₅ [M+H]⁺ 380.21, found 380.29.

[0356] Step 3: To a solution of tert-butyl (S,E)-2-((tert-butoxycarbonyl)amino)-3-(4-(N-hydroxycarbamimidoyl)phenyl)propanoate (4.0 g, 10.5 mmol) in toluene (100 mL) was added triethylamine (3.20 g, 4.41 mL, 31.6 mmol) followed by dropwise of 2-ethoxyacetyl chloride (1.55 g, 1.39 mL, 12.6 mmol). The mixture was stirred at 120° C. for 18 h. The reaction mixture was concentrated under reduced pressure. The crude compound was purified by Biotage-isolera using asilica column and the compound eluted with 20% of ethyl acetate in hexane. Pure fractions were combined and concentrated under reduced pressure to afford tert-butyl (S)-2-((tert-butoxycarbonyl)amino)-3-(4-(5-(ethoxymethyl)-1,2,4-oxadiazol-3-yl)phenyl)propanoate. LC-MS found for C₂₃H₃₃N₃O₆: m/z 448.3 [M+H]^{+ (}1.40 min).

[0357] Step 4: To a stirred solution of tert-butyl (S)-2-((tert-butoxycarbonyl)amino)-3-(4-(5-(ethoxymethyl)-1,2,4-oxadiazol-3-yl)phenyl)propanoate (3.10 g, 6.93 mmol) in DCM (50 mL) was added TFA (7.90 g, 5.34 mL, 69.3 mmol) at 0° C. The reaction mixture was stirred at 24° C. for 24 h. The reaction mixture was concentrated under reduced pressure to afford (S)-2-amino-3-(4-(5-(ethoxymethyl)-1,2,4-oxadiazol-3-yl)phenyl)propanoic acid. LC-MS found for Cl₄H₁₇N₃O₄: m/z 292.0 [M+H]^{+ (}0.34 min).

[0358] Step 5: To a stirred solution of (S)-2-amino-3-(4-(5-(ethoxymethyl)-1,2,4-oxadiazol-3-yl)phenyl)propanoic acid (2.50 g, 8.58 mmol) in THF (50 mL) and water (50 mL) were added sodium bicarbonate (3.60 g, 42.9 mmol) and (9H-fluoren-9-yl)methyl (2,5-dioxopyrrolidin-1-yl) carbonate (2.89 g, 8.58 mmol) at room temperature. The reaction mixture was stirred at 25° C. for 2 h. Reaction mixture was acidified with 1N HCl (pH ˜2) and extracted with ethyl acetate (2×200 mL). The combined organic layer was washed with brine (150 mL), dried over Na₂SO₄, filtered, and concentrated under reduced pressure. The crude compound was purified by Teledyne Isco (80 g silica gel, eluting with 0 to 100% ethyl acetate in hexanes). Pure fractions were combined and concentrated under reduced pressure to afford (S)-2-((((9H-fluoren-9-yl)methoxy)carbonyl)amino)-3-(4-(5-(ethoxymethyl)-1,2,4-oxadiazol-3-yl)phenyl)propanoic acid. LC-MS found for C₂₉H₂₇N₃O₆: m/z 514.3 [M+H]^{+ (}1.31 min).

[chemical structure]

### (S)-2-((((9H-fluoren-9-yl)methoxy)carbonyl)amino)-3-(4-(5-methyl-1,3,4-oxadiazol-2-yl)phenyl)propanoic acid

[0359] Step 1: To a stirred solution of 4-bromobenzohydrazide (30.0 g, 140 mmol) in DMA (150 mL) was added POCl₃ (14.3 mL, 153 mmol) dropwise at 80° C. The reaction mixture was stirred at 80° C. for 16 h. The reaction mixture was diluted with ice water (1000 mL), quenched with Na₂CO₃ solution and extracted with DCM (1000 mL). The combined organic layer was washed with brine (500 mL), dried over anhydrous sodium sulphate, filtered and concentrated under reduced pressure. The crude compound was purified by Biotage using a silica gel column and the compound was eluted with 30% ethyl acetate in pet ether. Pure fractions were combined and concentrated under reduced pressure to afford 2-(4-bromophenyl)-5-methyl-1,3,4-oxadiazole. MS ESI calculated for C₉H₇BrN₂O [M+H]⁺ 238.97, found 238.95.

[0360] Step 2: A stirred solution of nickel chloride, dimethoxyethane adduct (457 mg, 2.08 mmol) and picolinimidamide hydrochloride (656 mg, 4.16 mmol) in DMA (40 mL) under argon was stirred at 50° C. for 40 min. Then TBAI (3.84 g, 10.4 mmol), (R)-2-((((9H-fluoren-9-yl)methoxy)carbonyl)amino)-3-bromopropanoate (5.00 g, 10.4 mmol), 2-(4-bromophenyl)-5-methyl-1,3,4-oxadiazole (2.49 g, 10.4 mmol) and zinc (1.36 g, 20.8 mmol) were added to the reaction mixture at room temperature. The reaction mixture was stirred at 25° C. for 16 h. The reaction mixture was quenched with ice cold water (150 mL) and extracted with EtOAc (3×70 mL). The combined organic layer was washed with ice cold water (100 mL), brine (100 mL), dried over anhydrous sodium sulphate, filtered and concentrated under reduced pressure. The crude compound was purified by Biotage using a silica gel column and the compound was eluted with 30% ethyl acetate in petroleum ether. Pure fractions were combined and concentrated under reduced pressure to afford benzyl (S)-2-((((9H-fluoren-9-yl)methoxy)carbonyl)amino)-3-(4-(5-methyl-1,3,4-oxadiazol-2-yl)phenyl)propanoate. MS ESI calculated for C₃₄H₂₉N₃O₅ [M+H]⁺ 560.21, found 560.33.

[0361] Step 3: To a stirred solution of benzyl (S)-2-((((9H-fluoren-9-yl)methoxy)carbonyl)amino)-3-(4-(5-methyl-1,3,4-oxadiazol-2-yl)phenyl)propanoate (5.00 g, 8.93 mmol) in THF (75 mL) was added Pd/C (2.35 g, 625 mol) at room temperature. The reaction mixture was stirred under hydrogen atmosphere at 25° C. for 16 h. The reaction mixture was filtered through a CELITE bed. The filtrate was concentrated under reduced pressure. The crude compound was stirred in DCM (10 mL) and diethyl ether was added. The precipitated solid was filtered and dried under reduced pressure to afford (S)-2-((((9H-fluoren-9-yl)methoxy)carbonyl)amino)-3-(4-(5-methyl-1,3,4-oxadiazol-2-yl)phenyl)propanoic acid. MS ESI calculated for C₂₇H₂₃N₃O₅ [M+H]⁺ 470.16, found 470.22. ¹H NMR (400 MHz, DMSO-d₆): δ (ppm) 12.82 (br s, 1H), 7.83-7.94 (m, 4H), 7.77 (d, J=8.4 Hz, 1H), 7.62 (d, J=6.4 Hz, 2H), 7.47 (d, J=8.0 Hz, 2H), 7.39 (td, J=7.4 Hz, 2.8 Hz, 2H), 7.23-7.35 (m, 2H), 4.07-4.36 (m, 4H), 3.18 (dd, J=14.0 Hz, 4.4 Hz, 1H), 2.83-3.02 (m, 1H), 2.57 (s, 3H).

[chemical structure]

### (S)-2-((((9H-fluoren-9-yl)methoxy)carbonyl)amino)-3-(5-methyl-1,3,4-oxadiazol-2-yl)propanoic acid

[0362] Step 1: To a stirred solution of (S)-4-(benzyloxy)-3-(((benzyloxy)carbonyl)amino)-4-oxobutanoic acid (35.0 g, 97.9 mmol) in THF (1 L) were added N-methylmorpholine (10.8 mL, 97.9 mmol) and ethyl chloroformate (9.41 mL, 97.9 mmol) at −15° C. The reaction mixture was stirred at −15° C. for 15 min. Then a solution of acetohydrazide (7.26 g, 97.9 mmol) in THF (200 mL) was added dropwise to the reaction mixture at −15° C. The reaction mixture was stirred at 25° C. for 2 h. Reaction mixture was quenched with ice water (500 mL) and extracted with EtOAc (3×150 mL). The combined organic layer was washed with brine (100 mL), dried over sodium sulfate, filtered and concentrated under reduced pressure to afford (S,Z)—N-acetyl-4-(benzyloxy)-3-(((benzyloxy)carbonyl)amino)-4-oxobutanehydrazonic acid. MS ESI calculated for C₂₁H₂₃N₃O₆ [M+H]⁺ 414.16, found 414.14.

[0363] Step 2: To a stirred solution of (S,Z)—N-acetyl-4-(benzyloxy)-3-(((benzyloxy)carbonyl)amino)-4-oxobutanehydrazonic acid (10.00 g, 21.77 mmol) in toluene (50 mL) was added Burgess Reagent (7.781 g, 32.65 mmol) at 0° C. The reaction mixture was stirred at 80° C. for 16 h. The reaction mixture was quenched with cold water (100 mL) and extracted with ethyl acetate (2×100 mL). The combined organic layer was dried over anhydrous sodium sulphate, filtered and concentrated under reduced pressure. The crude compound was purified by Biotage using a 120 g silica cartridge and the compound was eluted with 100% EtOAc. Pure fractions were combined and concentrated under reduced pressure to afford benzyl (S)-2-(((benzyloxy)carbonyl)amino)-3-(5-methyl-1,3,4-oxadiazol-2-yl)propanoate. MS ESI calculated for C₂₁H₂₁N₃O₅ [M+H]⁺ 396.15, found 396.26.

[0364] Step 3: To a stirred solution of benzyl (S)-2-(((benzyloxy)carbonyl)amino)-3-(5-methyl-1,3,4-oxadiazol-2-yl)propanoate (11.0 g, 25.0 mmol) in MeOH (250 mL) was added 10% Pearlman's catalyst (5.00 g, 4.70 mmol) at room temperature. The mixture was stirred at room temperature for 10 min. The reaction mixture was purged with N₂ gas at room temperature for 5 min. The reaction mixture was stirred under H₂ balloon at 25° C. for 16 h. The reaction mixture was filtered through a CELITE pad and washed with MeOH (50 mL) and DCM (100 mL). The organic layer was concentrated under reduced pressure. The crude compound was washed with n-pentane (3×50 mL) and dried under reduced pressure to afford (S)-2-amino-3-(5-methyl-1,3,4-oxadiazol-2-yl)propanoic acid. ¹H NMR (400 MHz, DMSO-d₆): δ (ppm) 7.50-8.89 (m, 2H), 3.64 (d, J=6.8 Hz, 1H), 3.56 (dd, J=9.0 Hz, 4.6 Hz, 1H), 3.37-3.42 (m, 1H), 2.45 (s, 3H).

[0365] Step 4: To a stirred solution of (S)-2-amino-3-(5-methyl-1,3,4-oxadiazol-2-yl)propanoic acid (4.20 g, 22.1 mmol) in THF (35 mL) and H₂O (35 mL) were added sodium bicarbonate (2.84 g, 33.1 mmol) and (9H-fluoren-9-yl)methyl (2,5-dioxopyrrolidin-1-yl) carbonate (11.4 g, 33.1 mmol) at 0° C. The reaction mixture was stirred at 25° C. for 16 h and then diluted with EtOAc (100 mL) and acidified with 1M HCl (pH ˜2-3). The aqueous layer was extracted with EtOAc (2×100 mL). The combined organic layer was washed with saturated brine (50 mL), dried over anhydrous sodium sulfate, filtered and concentrated under reduced pressure. The crude compound was purified by Biotage using a 80 g silica cartridge and the compound was eluted with 100% EtOAc. Pure fractions were combined, concentrated under reduced pressure and the isolated compound was washed with n-pentane (2×100 mL) and again triturated with ether and pentane (90:10). A few drops of EtOAc (three times) were added to the reaction mixture and a solid was filtered. The solid was washed with ether and dried under reduced pressure to afford (S)-2-((((9H-fluoren-9-yl)methoxy)carbonyl)amino)-3-(5-methyl-1,3,4-oxadiazol-2-yl)propanoic acid. MS ESI calculated for C₂₁H₁₉N₃O₅ [M+H]⁺ 394.13, found 394.22. ¹H NMR (400 MHz, DMSO-d₆): δ (ppm) 13.10 (br s, 1H), 7.89 (d, J=7.6 Hz, 2H), 7.58-7.82 (m, 3H), 7.42 (t, J=7.4 Hz, 2H), 7.32 (td, J=7.4 Hz, 0.9 Hz, 2H), 4.33-4.45 (m, 1H), 4.17-4.32 (m, 3H), 3.27-3.30 (m, 1H), 3.13-3.22 (m, 1H), 2.43 (s, 3H).

[chemical structure]

### (S)-2-((((9H-fluoren-9-yl)methoxy)carbonyl)amino)-3-(4-((pyrrolidine-1-carbonyl)oxy)phenyl)propanoic acid

[0366] Step 1: To a stirred solution of tert-butyl (tert-butoxycarbonyl)-L-tyrosinate (20.00 g, 59.27 mmol) in DCM (100 mL) were added DMAP (7.241 g, 59.27 mmol), TEA (16.5 mL, 118.5 mmol) and pyrrolidine-1-carbonyl chloride (8.710 g, 65.20 mmol) at room temperature. The reaction mixture was stirred at 25° C. for 16 h. The reaction mixture was concentrated under reduced pressure. The crude compound was diluted with MeOH (100 mL) and stirred at room temperature for 30 min. The precipitated solid was filtered and washed with MeOH (2×20 mL) and dried under vacuum to afford (S)-4-(3-(tert-butoxy)-2-((tert-butoxycarbonyl)amino)-3-oxopropyl)phenyl pyrrolidine-1-carboxylate. MS ESI calculated for C₂₃H₃₄N₂O₆ [M+H]⁺ 435.24, found 435.31.

[0367] Step 2: To a stirred solution of (S)-4-(3-(tert-butoxy)-2-((tert-butoxycarbonyl)amino)-3-oxopropyl)phenyl pyrrolidine-1-carboxylate (12.00 g, 27.62 mmol) in DCM (60 mL) was added TFA (63.83 mL, 828.5 mmol) at room temperature. The reaction mixture was stirred at 25° C. for 16 h. The reaction mixture was concentrated under reduced pressure, co-distilled with toluene (50 mL) and dried under vacuum to afford (S)-2-amino-3-(4-((pyrrolidine-1-carbonyl)oxy)phenyl)propanoic acid. MS ESI calculated for C₁₄H₁₈N₂O₄ [M+H]⁺ 279.13, found 279.20.

[0368] Step 3: To a stirred solution of (S)-2-amino-3-(4-((pyrrolidine-1-carbonyl)oxy)phenyl)propanoic acid (8.00 g, 28.7 mmol) in acetone (50 mL) and water (50 mL) were added sodium bicarbonate (7.24 g, 86.2 mmol) and (9H-fluoren-9-yl)methyl (2,5-dioxopyrrolidin-1-yl) carbonate (10.7 g, 31.6 mmol) at room temperature. The reaction mixture was stirred at 25° C. for 5 h. The reaction mixture was concentrated under reduced pressure. The aqueous layer was washed with diethyl ether (2×100 mL), acidified with 2N HCl (pH-4) and extracted with 10% MeOH in DCM (2×200 mL). The combined organic layer was dried over anhydrous Na₂SO₄, filtered and concentrated under reduced pressure. The crude compound was diluted with 10% diethyl ether in hexane (100 mL) and stirred at 25° C. for 30 min. The mixture was filtered and dried under reduced pressure to afford (S)-2-((((9H-fluoren-9-yl)methoxy)carbonyl)amino)-3-(4-((pyrrolidine-1-carbonyl)oxy)phenyl)propanoic acid. MS ESI calculated for C₂₉H₂₈N₂O₆ [M+H]⁺ 501.19, found 501.29. ¹H NMR (400 MHz, DMSO-d₆): δ (ppm) 7.88 (d, J=7.6 Hz, 2H), 7.56-7.72 (m, 2H), 7.41 (t, J=7.6 Hz, 2H), 7.27-7.36 (m, 2H), 7.15 (d, J=8.0 Hz, 2H), 6.94 (d, J=8.4 Hz, 3H), 3.71-4.39 (m, 4H), 3.44-3.50 (m, 2H), 3.35-3.37 (m, 3H), 3.05 (dd, J=13.4 Hz, 4.6 Hz, 1H), 2.84-2.97 (m, 1H), 1.79-1.96 (m, 4H).

[chemical structure]

### (S)-2-((((9H-fluoren-9-yl)methoxy)carbonyl)amino)-3-(5-methyl-1,2,4-oxadiazol-3-yl)propanoic acid

[0369] Step 1: To a stirred solution of (S)-2-((tert-butoxycarbonyl)amino)-3-cyanopropanoic acid (24.00 g, 112.0 mmol) in DCM (100 mL) was added tert-butyl (E)-N,N′-diisopropylcarbamimidate (80 mL, 336.1 mmol) at room temperature. A curdy white precipitate was formed during the reaction. The reaction mixture was stirred at 45° C. for 5 h. The reaction mixture was filtered and washed with DCM (2×50 mL). The filtrate was concentrated under reduced pressure. The crude compound was purified by Biotage-isolera using a 120 g silica cartridge and the compound eluted with 30% of ethyl acetate in petroleum ether. Pure fractions were combined and concentrated under reduced pressure to afford tert-butyl (S)-2-((tert-butoxycarbonyl)amino)-3-cyanopropanoate. MS ESI calculated for C₁₃H₂₂N₂O₄ [M+H]⁺ 271.16, found 271.20.

[0370] Step 2: To a stirred solution of tert-butyl (S)-2-((tert-butoxycarbonyl)amino)-3-cyanopropanoate (20.0 g, 74.0 mmol) in DMSO (150 mL) were added sodium bicarbonate (46.6 g, 555 mmol) and hydroxylammoniumchloride (28.3 g, 407 mmol) at room temperature. The reaction mixture was stirred at 100° C. for 16 h. The reaction mixture was cooled to room temperature, quenched with water (200 mL) and extracted with EtOAc (2×300 mL). The combined organic layer was washed with water (2×100 mL), brine (100 mL), dried over Na₂SO₄, filtered and concentrated under reduced pressure to afford tert-butyl (S)-2-((tert-butoxycarbonyl)amino)-4-(hydroxyamino)-4-iminobutanoate. MS ESI calculated for C₁₃H₂₅N₃O₅ [M+H]⁺ 304.18, found 304.22.

[0371] Step 3: To a stirred solution of tert-butyl (S)-2-((tert-butoxycarbonyl)amino)-4-(hydroxyamino)-4-iminobutanoate (9.50 g, 31.3 mmol) in ACN (100 mL) were added cesium carbonate (20.4 g, 62.6 mmol) and acetyl chloride (2.45 mL, 34.4 mmol) at room temperature. The reaction mixture was stirred at 25° C. for 3 h. The reaction was monitored by TLC which showed new spot and also by LCMS which showed 93% of intermediate mass. The reaction mixture was stirred at reflux for 3 h. The reaction mixture was filtered through a CELITE pad and washed with ACN (2×50 mL). The filtrate was concentrated under reduced pressure. The crude compound was purified by Biotage-isolera using a silica column and the compound eluted with 30% of ethyl acetate in petroleum ether. Pure fractions were combined and concentrated under reduced pressure to afford tert-butyl (S)-2-((tert-butoxycarbonyl)amino)-3-(5-methyl-1,2,4-oxadiazol-3-yl)propanoate. MS ESI calculated for C₁₅H₂₅N₃O₅ [M+H]⁺ 328.18, found 328.25.

[0372] Step 4: To a stirred solution of tert-butyl (S)-2-((tert-butoxycarbonyl)amino)-3-(5-methyl-1,2,4-oxadiazol-3-yl)propanoate (5.80 g, 17.7 mmol) in DCM (20 mL) was added TFA (20.5 mL, 266 mmol) at room temperature. The reaction mixture was stirred at 25° C. for 16 h. The reaction mixture was concentrated under reduced pressure, co-distilled with toluene (10 mL) and dried under reduced pressure to afford (S)-2-amino-3-(5-methyl-1,2,4-oxadiazol-3-yl)propanoic acid. MS ESI calculated for C₆H₉N₃O₃[M+H]⁺ 172.06, found 171.99.

[0373] Step 5: To a stirred solution of (S)-2-amino-3-(5-methyl-1,2,4-oxadiazol-3-yl)propanoic acid (4.20 g, 24.5 mmol) in acetone (20 mL) and H₂O (20 mL) were added sodium bicarbonate (4.12 g, 49.1 mmol) and (9H-fluoren-9-yl)methyl (2,5-dioxopyrrolidin-1-yl) carbonate (9.11 g, 27.0 mmol) at room temperature. The reaction mixture was stirred at 25° C. for 5 h. The reaction mixture was concentrated under reduced pressure, given acid-base treatment and extracted with 10% MeOH in DCM (2×200 mL). The combined organic layer was dried over Na₂SO₄, filtered and concentrated under reduced pressure. The crude compound was purified twice by Biotage-isolera using a 120 g silica cartridge and the compound eluted with 10% MeOH in DCM. Pure fractions were combined and concentrated under reduced pressure. The isolated compound was washed with 10% diethyl ether in hexane and dried under reduced pressure to afford (S)-2-((((9H-fluoren-9-yl)methoxy)carbonyl)amino)-3-(5-methyl-1,2,4-oxadiazol-3-yl)propanoic acid. MS ESI calculated for C₂₁H₁₉N₃O₅ [M+H]⁺ 394.13, found 394.19. ¹H NMR (400 MHz, DMSO-d₆): δ (ppm) 12.95 (br s, 1H), 7.89 (d, J=7.6 Hz, 2H), 7.76 (d, J=8.0 Hz, 1H), 7.68 (d, J=7.6 Hz, 2H), 7.42 (t, J=7.4 Hz, 2H), 7.31 (t, J=7.4 Hz, 2H), 4.33-4.64 (m, 1H), 4.10-4.33 (m, 3H), 2.97-3.21 (m, 2H), 2.55 (s, 3H).

[chemical structure]

### (S)-2-((((9H-fluoren-9-yl)methoxy)carbonyl)amino)-3-(4-(4-acetylpiperazin-1-yl)phenyl)propanoic acid

[0374] Step 1: To a stirred solution of (S)-3-(4-bromophenyl)-2-((tert-butoxycarbonyl)amino)propanoic acid (6 g, 17.43 mmol) in toluene (180 mL) was added XPhos Pd G₂ (2.057 g, 2.61 mmol) at 25° C. under nitrogen. The resulting solution was stirred at 100° C. for 10 min. 1-(Piperazin-1-yl)ethan-1-one (2.234 g, 17.43 mmol) and Cs₂CO₃ (5.04 g, 26.1 mmol) were added and the resulting solution was stirred at 110° C. for 2 h. The reaction was cooled to rt and quenched with H₂O (500 mL) and extracted with EtOAc (2×500 mL). The combined organic layer was washed with brine (3×200 mL), dried over anhydrous Na₂SO₄ and filtered. The filtrate was concentrated under reduced pressure and the residue was purified by silica gel column chromatography, eluted with 0-60% EtOAc in PE to give (S)-3-(4-(4-acetylpiperazin-1-yl)phenyl)-2-((tert-butoxycarbonyl)amino)propanoic acid. MS ESI calculated for C₂₀H₃₀N₃O₅ [M+H]⁺ 392.21, found 392.25. ¹H NMR (400 MHz, Methanol-d₄) δ 7.12 (d, J=8 Hz, 2H), 6.89 (d, J=8 Hz, 2H), 4.16-4.13 (m, 1H), 3.72-3.65 (m, 4H), 3.14-3.04 (m, 4H), 2.93-2.81 (m, 2H), 2.13 (s, 3H), 1.38-1.29 (m, 9H).

[0375] Step 2: To a stirred solution of (S)-3-(4-(4-acetylpiperazin-1-yl)phenyl)-2-((tert-butoxycarbonyl)amino)propanoic acid (10 g, 25.5 mmol) in DCM (30 mL) was added TFA (30 mL) at rt. The solution was stirred at 25° C. for 1 h then concentrated under reduced pressure. The crude (S)-3-(4-(4-acetylpiperazin-1-yl)phenyl)-2-aminopropanoic acid was used to the next step directly without any further purification. MS ESI calculated for C₁₅H₂₂N₃O₃[M+H]⁺ 292.16, found 292.20.

[0376] Step 3: To a stirred solution of (S)-3-(4-(4-acetylpiperazin-1-yl)phenyl)-2-(carboxyamino)propanoic acid (7 g, 20.87 mmol) in THF (25 mL) and water (25 mL) was added Fmoc-OSu (6.34 g, 18.79 mmol) at 25° C. under nitrogen. Then, NaHCO₃ (8.77 g, 104 mmol) was added. The resulting mixture was stirred at 25° C. for 2 h. The pH was adjusted to 5 with 1 N HCl and the mixture was extracted with EtOAc (2×200 mL). The combined organic layer was washed with brine (3×100 mL), dried over anhydrous Na₂SO₄ and filtered. The filtrate was concentrated under reduced pressure and the residue was purified by reverse phase flash chromatography with the following conditions: Column: C18 silica gel (330 g); Mobile Phase A: water (0.1% TFA), Mobile Phase B: MeCN; (Gradient: 5% B hold 5 min, up to 55% B within 15 min, 55% B hold 5 min; up to 95% B within 20 min, 95% B hold 5 min); Flow rate: 90 mL/min; Detector: UV 210 nm; RT=45 min. The product-containing fractions were collected and concentrated in vacuo to give (S)-2-((((9H-fluoren-9-yl)methoxy)carbonyl)amino)-3-(4-(4-acetylpiperazin-1-yl)phenyl)propanoic acid. MS ESI calculated for C₃₀H₃₂N₃O₅ [M+H]⁺ 514.23, found 514.30. ¹H NMR (400 MHz, Methanol-d₄) δ 7.78-7.76 (m, 2H), 7.61-7.52 (m, 2H), 7.40-7.37 (m, 2H), 7.32-7.22 (m, 4H), 7.08-6.98 (m, 2H), 4.47-4.43 (m, 1H), 4.33-4.31 (m, 1H), 4.14-4.02 (m, 2H), 3.68-3.63 (m, 4H), 3.23-3.08 (m, 5H), 2.91-2.85 (m, 1H), 2.11 (s, 3H).

[chemical structure]

### (S)-2-((((9H-fluoren-9-yl)methoxy)carbonyl)amino)-3-(6-(4-acetylpiperazin-1-yl)pyridin-3-yl)propanoic acid

[0377] Step 1: To a mixture of 1-(piperazin-1-yl)ethan-1-one (21.85 g, 170 mmol) in DMF (150 mL) was added 5-bromo-2-fluoropyridine (15 g, 85 mmol) under argon at rt. The reaction was stirred at 100° C. for 2 h, then diluted with 300 mL EtOAc and washed with H₂O (3×80 mL), aqueous saturated NaCl (80 mL), dried over Na₂SO₄ and filtered. The filtrate was concentrated under reduced pressure. The residue was purified by silica gel column chromatography, eluting with a gradient of 0%-100% EtOAc in PE. The fractions containing desired product were combined and concentrated under reduced pressure to afford 1-(4-(5-bromopyridin-2-yl)piperazin-1-yl)ethan-1-one. MS ESI calculated for C₁₁H₁₅BrN₃O [M+H]⁺ 284.03 and 286.03, found 283.90 and 285.90.

[0378] Step 2: A mixture of nickel (II) chloride ethylene glycol dimethyl ether complex (0.696 g, 3.17 mmol) and 1,10-phenanthroline (0.571 g, 3.17 mmol) in DMA (2 mL) was heated at 50° C. for 0.5 hours. The mixture of 1-(4-(5-bromopyridin-2-yl)piperazin-1-yl)ethan-1-one (4.5 g, 15.84 mmol), tert-butyl (R)-2-((((9H-fluoren-9-yl)methoxy)carbonyl)amino)-3-bromopropanoate (7.78 g, 17.42 mmol) and tetrabutylammonium iodide (5.85 g, 15.84 mmol) in DMA (2 mL) were added at 25° C. Then zinc powder (2.071 g, 31.7 mmol) was added. The resulting mixture was stirred for 1 h at 50° C. The resulting mixture was poured into water (300 mL) and extracted with EtOAc (3×300 mL). The organic layer was washed with water (100 mL) and brine (2×80 mL), dried over anhydrous sodium sulfate and concentrated under reduced pressure. The residue was purified by column chromatography on silica gel eluting with DCM-MeOH (10:1) to afford tert-butyl (S)-2-((((9H-fluoren-9-yl)methoxy)carbonyl)amino)-3-(6-(4-acetylpiperazin-1-yl)pyridin-3-yl)propanoate. MS ESI calculated for C₃₃H₃₉N₄O₅ [M+H]⁺ 571.28, found 571.40.

[0379] Step 3: To a mixture of tert-butyl (S)-2-((((9H-fluoren-9-yl)methoxy)carbonyl)amino)-3-(6-(4-acetylpiperazin-1-yl)pyridin-3-yl)propanoate (7.3 g, 12.79 mmol) in DCM (70 mL) was added TFA (70 mL, 909 mmol) under argon at rt. The reaction was stirred at rt for 1 h then concentrated under reduced pressure. The residue was dissolved in THF (20 mL) and the resultant mixture was purified by reverse phase Combi-Flash with the following conditions: Column C18 silica gel column (330 g), 20-35 m; Mobile Phase A: 5 mM aq. TFA; Mobile Phase B: MeCN; (Gradient: 0% B hold 10 min, up to 42.3% B within 35 min, 42.3% B hold 3.2 min; up to 95% B within 2 min, 95% B hold 10 min); Flow rate: 60 mL/min; Detector: UV 254 & 210 nm; RT: 35.32 min. The product-containing fractions were collected and concentrated under vacuum to afford (S)-2-((((9H-fluoren-9-yl)methoxy)carbonyl)amino)-3-(6-(4-acetylpiperazin-1-yl)pyridin-3-yl)propanoic acid. MS ESI calculated for C₂₉H₃₁N₄O₅ [M+H]⁺ 515.22, found 515.15. ¹H NMR (300 MHz, Methanol-d₄) δ 7.87-7.79 (m, 4H), 7.62-7.55 (m, 2H), 7.42-7.27 (m, 4H), 7.11-7.09 (m, 1H), 4.51-4.46 (m, 1H), 4.32-4.09 (m, 3H), 3.65-3.54 (m, 8H), 3.29-3.20 (m, 1H), 2.94-2.89 (m, 1H), 2.12 (s, 3H).

[chemical structure]

### (S)-5-carboxy-1-(9H-fluoren-9-yl)-N,N,N-trimethyl-3,11-dioxo-2,14,17-trioxa-4,10-diazanonadecan-19-aminium 2,2,2-trifluoroacetate

[0380] Step 1: To a solution of tert-butyl 3-(2-(2-bromoethoxy)ethoxy)propanoate (10 g, 33.6 mmol) in ACN (100 mL) was added Me₂NH (5.49 g, 67.3 mmol) at room temperature. The reaction mixture was stirred at 90° C. for 16 h. The resulting solution was diluted with water (200 mL) and extracted with EA (3×300 mL) and the combined organic layer was washed with brine (3×300 mL), dried over anhydrous Na₂SO₄ and filtered. The residue was purified by silica gel column chromatography, eluted with gradient 0-10% MeOH in DCM to afford tert-butyl 3-(2-(2-(dimethylamino)ethoxy)ethoxy)propanoate. MS ESI calculated for C₁₃H₂₈NO₄ [M+H]⁺ 262.20, found 262.15.

[0381] Step 2: A solution of tert-butyl 3-(2-(2-(dimethylamino)ethoxy)ethoxy)propanoate (8 g, 30.6 mmol) in DCM (100 mL) and TFA (100 mL) at 0° C. was prepared. The reaction mixture was stirred at room temperature for 2 h. The resulting solution was concentrated under reduced pressure to afford 3-(2-(2-(dimethylamino)ethoxy)ethoxy)propanoic acid. MS ESI calculated for C₉H₂₀NO₄ [M+H]⁺ 206.13, found 206.10.

[0382] Step 3: To a stirred solution of 3-(2-(2-(dimethylamino)ethoxy)ethoxy)propanoic acid (6.5 g, 31.7 mmol) in DMF (100 mL) were added HATU (24.08 g, 63.3 mmol), DIEA (6.08 ml, 34.8 mmol) and tert-butyl (((9H-fluoren-9-yl)methoxy)carbonyl)-L-lysinate (13.44 g, 31.7 mmol) at −40° C. After the resulting mixture was stirred at −40° C. for 4 h, it was quenched with water (100 mL) and extracted with EA (3×500 mL). The combined organic layer was washed with brine (3×100 mL), dried over anhydrous Na₂SO₄ and filtered. The filtrate was concentrated under reduced pressure and the residue was purified by silica gel column chromatography, eluted with gradient 0-50% EA in PE to afford tert-butyl (S)-17-((((9H-fluoren-9-yl)methoxy)carbonyl)amino)-2-methyl-11-oxo-5,8-dioxa-2,12-diazaoctadecan-18-oate. MS ESI calculated for C₃₄H₅₀N₃O₇[M+H]⁺ 612.36, found 612.45. ¹H NMR (300 MHz, Chloroform-d) δ 7.79-7.76 (m, 2H), 7.63-7.61 (m, 2H), 7.44-7.41 (m, 2H), 7.35-7.30 (m, 2H), 6.92 (s, 1H), 5.56-5.53 (m, 1H), 4.26-4.21 (m, 2H), 3.87-3.85 (m, 2H), 3.73-3.71 (m, 2H), 3.62-3.53 (m, 5H), 3.30-3.20 (m, 4H), 2.88 (s, 6H), 2.50-2.48 (m, 2H), 1.84-1.82 (m, 1H), 1.70-1.68 (m, 1H), 1.57-1.40 (m, 13H).

[0383] Step 4: To a solution of tert-butyl (S)-17-((((9H-fluoren-9-yl)methoxy)carbonyl)amino)-2-methyl-11-oxo-5,8-dioxa-2,12-diazaoctadecan-18-oate (1 g, 1.635 mmol) in ACN (50 mL) were added NaHCO₃ (0.137 g, 1.635 mmol) and Mel (0.102 ml, 1.635 mmol) at room temperature. The reaction mixture was stirred at room temperature for 5 h. The resulting solution was diluted with water (100 mL) and extracted with EtOAc (3×300 mL) and the combined organic layer was washed with brine (3×100 mL), dried over anhydrous Na₂SO₄ and filtered. The residue was concentrated under reduced pressure to afford (S)-5-carboxy-1-(9H-fluoren-9-yl)-N,N,N-trimethyl-3,11-dioxo-2,14,17-trioxa-4,10-diazanonadecan-19-aminium iodide. MS ESI calculated for C₃₅H₅₂N₃O₇ [M-tBu]⁺ 570.32, found 570.30.

[0384] Step 5: To a stirred solution of (S)-5-carboxy-1-(9H-fluoren-9-yl)-N,N,N-trimethyl-3,11-dioxo-2,14,17-trioxa-4,10-diazanonadecan-19-aminium iodide (7 g, 10.03 mmol) in DCM (100 mL) was added TFA (100 mL) at room temperature. The reaction mixture was stirred at room temperature for 1 h. The filtrate was concentrated under reduced pressure and the residue was purified by RP Flash as following conditions: (Column: Flash C¹⁸ 330 g; Mobile Phase A: water (0.1% TFA); Mobile Phase B: ACN; Flow rate: 100 mL/min; 2% B in 10 min; 2% to 20% B in 5 min; 20% to 50% B in 20 min; Detector: UV 210 nm. RT: 35 min) to afford (S)-5-carboxy-1-(9H-fluoren-9-yl)-N,N,N-trimethyl-3,11-dioxo-2,14,17-trioxa-4,10-diazanonadecan-19-aminium 2,2,2-trifluoroacetate. MS ESI calculated for C₃₁H₄₄N₃O₇⁺ [M]⁺ 570.32, found 570.30. ¹H NMR (300 MHz, CD₃OD) δ 7.83-7.80 (m, 2H), 7.71-7.67 (m, 2H), 7.43-7.30 (m, 4H), 4.44-4.32 (m, 2H), 4.27-4.12 (m, 2H), 3.92-3.89 (m, 2H), 3.74-3.70 (m, 2H), 3.62-3.53 (m, 6H), 3.26-3.17 (m, 11H), 2.44-2.40 (m, 2H), 1.89-1.70 (m, 2H), 1.59-1.39 (m, 4H).

[chemical structure]

### (S)-2-((((9H-fluoren-9-yl)methoxy)carbonyl)amino)-3-(5-(methoxymethyl)-1,2,4-oxadiazol-3-yl)propanoic acid

[0385] Step 1: To a stirred solution of (tert-butoxycarbonyl)-L-asparagine (100.0 g, 430.6 mmol) in pyridine (250 mL) was added dropwise a solution of DCC (88.84 g, 430.6 mmol) in acetone (500 mL) at room temperature. The reaction mixture was stirred at 25° C. for 16 h. The reaction mixture was filtered and washed with acetone (2×100 mL). The filtrate was concentrated under reduced pressure. The residue was diluted with DCM (500 mL) and washed with 2N HCl (300 mL) and water (200 mL). The combined organic layer was dried over over Na₂SO₄, filtered and concentrated under reduced pressure. The crude compound was purified by acid base treatment (using NaHCO₃ and 2N HCl) to afford (S)-2-((tert-butoxycarbonyl)amino)-3-cyanopropanoic acid. MS ESI calculated for C₉H₁₄N₂O₄ [M+H]⁺ 215.10, found 215.11.

[0386] Step 2: To a stirred solution of (S)-2-((tert-butoxycarbonyl)amino)-3-cyanopropanoic acid (37.00 g, 172.7 mmol) in DCM (200 mL) was added tert-butyl (E)-N,N-diisopropylcarbamimidate (34.60 g, 172.7 mmol) at room temperature. During the reaction formation of a curdy white precipitate was formed. The reaction mixture was stirred at 45° C. for 5 h. Reaction mixture was filtered and washed with DCM (2×100 mL). The filtrate was concentrated under reduced pressure. The crude compound was purified by Biotage-isolera using a 120 g silica cartridge and the compound eluted with 30% of ethyl acetate in petroleum ether. Pure fractions were combined and concentrated under reduced pressure to afford tert-butyl (S)-2-((tert-butoxycarbonyl)amino)-3-cyanopropanoate. MS ESI calculated for C₁₃H₂₂N₂O₄ [M+H]⁺ 271.16, found 271.16.

[0387] Step 3: To a stirred solution of tert-butyl (S)-2-((tert-butoxycarbonyl)amino)-3-cyanopropanoate (45.0 g, 166 mmol) in DMSO (200 mL) were added sodium bicarbonate (105 g, 1.25 mol) and hydroxylammonium chloride (63.6 g, 916 mmol) at room temperature. The reaction mixture was stirred at 100° C. for 16 h. The reaction mixture was cooled to 25° C., then quenched with water (200 mL) and extracted with EtOAc (2×500 mL). The combined organic layer was dried over Na₂SO₄, filtered and concentrated under reduced pressure tert-butyl (S)-2-((tert-butoxycarbonyl)amino)-4-(hydroxyamino)-4-iminobutanoate. MS ESI calculated for C₁₃H₂₅N₃O₅ [M+H]⁺ 304.18, found 304.30.

[0388] Step 4: To a stirred solution of tert-butyl (S)-2-((tert-butoxycarbonyl)amino)-4-(hydroxyamino)-4-iminobutanoate (19.00 g, 62.63 mmol) in ACN (150 mL) were added cesium carbonate (40.81 g, 125.3 mmol), 2-methoxyacetyl chloride (8.156 g, 75.16 mmol) at room temperature. The reaction mixture was stirred at 25° C. for 3 h. Then the reaction mixture was stirred at 80° C. for 3 h. The reaction mixture was quenched with water (100 mL) and extracted with EtOAc (2×150 mL). The combined organic layer was dried over Na₂SO₄, filtered and concentrated under reduced pressure. The crude compound was purified by Biotage-isolera using a 120 g silica cartridge and the compound eluted with 40% of ethyl acetate in petroleum ether. Pure fractions were combined and concentrated under reduced pressure to afford tert-butyl (S)-2-((tert-butoxycarbonyl)amino)-3-(5-(methoxymethyl)-1,2,4-oxadiazol-3-yl)propanoate. MS ESI calculated for C₁₆H₂₇N₃O₆ [M+H]⁺ 358.19, found 358.41.

[0389] Step 5: To a stirred solution of tert-butyl (S)-2-((tert-butoxycarbonyl)amino)-3-(5-(methoxymethyl)-1,2,4-oxadiazol-3-yl)propanoate (11.0 g, 30.8 mmol) in DCM (60 mL) was added TFA (47.4 mL, 616 mmol) at room temperature. The reaction mixture was stirred at 25° C. for 8 h. The reaction mixture was concentrated under reduced pressure. The residue was co-distilled with toluene (20 mL) and dried under reduced pressure to afford (S)-2-amino-3-(5-(methoxymethyl)-1,2,4-oxadiazol-3-yl)propanoic acid. MS ESI calculated for C₇H₁₁N₃O₄ [M+H]⁺ 202.07, found 202.17.

[0390] Step 6: To a stirred solution of (S)-2-amino-3-(5-(methoxymethyl)-1,2,4-oxadiazol-3-yl)propanoic acid (6.20 g, 30.8 mmol) in acetone (30 mL) and H₂O (30 mL) were added sodium bicarbonate (5.18 g, 61.6 mmol) and (9H-fluoren-9-yl)methyl (2,5-dioxopyrrolidin-1-yl) carbonate (11.4 g, 33.9 mmol) at room temperature. The reaction mixture was stirred at 25° C. for 5 h. The reaction mixture was concentrated under reduced pressure. The residue was subjected to acid-base treatment and extracted with 10% MeOH in DCM (2×200 mL). The combined organic layer was dried over Na₂SO₄, filtered and concentrated under reduced pressure to provide crude compound. The crude compound was purified twice by Biotage-isolera using a 120 g silica cartridge and the compound eluted with 10% of MeOH in DCM. Pure fractions were combined and concentrated under reduced pressure. The isolated compound was washed with 10% diethyl ether in hexane and dried under reduced pressure to afford the compound.

[0391] The compound was further re-purified by Chiral SFC on Chiralpak-AS-H Column, 3*25 cm, 5μ, isocratic with 80% CO₂ and 20% (0.5% Formic Acid in IPA), flow rate 90 g/min, temperature 30.0° C., Back Pressure 120.0 bar, 75.0 mg per injection, 15.0 min stack time.

[0392] Pure fractions were combined, concentrated under reduced pressure and lyophilized separately to afford Peak 1 (R)-2-((((9H-fluoren-9-yl)methoxy)carbonyl)amino)-3-(5-(methoxymethyl)-1,2,4-oxadiazol-3-yl)propanoic acid (MS ESI calculated for C₂₂H₂₁N₃O₆ [M+H]⁺ 424.14, found 424.22. ¹H NMR (400 MHz, DMSO-d₆) VT at 90° C.: δ (ppm) 12.91 (br s, 1H), 7.87 (d, J=7.6 Hz, 2H), 7.50-7.71 (m, 3H), 7.41 (t, J=7.4 Hz, 2H), 7.31 (td, J=7.4 Hz, 1.0 Hz, 2H), 4.69 (s, 2H), 4.32-4.50 (m, 1H), 4.15-4.30 (m, 3H), 3.35 (s, 3H), 3.04-3.17 (m, 2H)) and Peak 2 (S)-2-((((9H-fluoren-9-yl)methoxy)carbonyl)amino)-3-(5-(methoxymethyl)-1,2,4-oxadiazol-3-yl)propanoic acid. MS ESI calculated for C₂₂H₂₁N₃O₆ [M+H]⁺ 424.14, found 424.22. ¹H NMR (400 MHz, DMSO-d₆) VT at 90° C.: δ (ppm) 12.80 (br s, 1H), 7.87 (d, J=7.6 Hz, 2H), 7.66 (d, J=7.2 Hz, 2H), 7.58 (br s, 1H), 7.41 (t, J=7.4 Hz, 2H), 7.25-7.36 (m, 2H), 4.69 (d, J=2.8 Hz, 2H), 4.38-4.50 (m, 1H), 4.14-4.32 (m, 3H), 3.35 (s, 3H), 3.05-3.18 (m, 2H).

### Preparation of Final Compounds:

### A. Generalized Procedure for Synthesizing Linear Peptide Precursors

[0393] Peptides in FIG. 1 were synthesized using standard solid-phase synthesis using Fmoc/tBu chemistry as exemplified in Chan, W. C.; White, P. D. “Fmoc Solid-Phase Synthesis: a Practical Approach”, Oxford University Press, Oxford, 2000; Steward, J.; Young, J. “Solid Phase Peptide Synthesis”, Pierce Chemical Company, Rockford, 1984.; Benoiton, N. L. “Chemistry of Peptide Synthesis”, CRC Press, New York, 2006; and Lloyd-Williams, P.; Albericio, F.; Giralt, E. “Chemical Approaches to the Synthesis of Peptides and Proteins”, CRC Press, New York, 1997.

[0394] During peptide chain elongation, the α-amino group of each amino acid was protected with a 9H-fluoren-9-ylmethoxycarbonyl group (Fmoc). To avoid any side reactions during the chain elongation steps, any reactive amino acid side chains also carry acid-labile protecting groups, effectively masking the reactive groups until removal upon treatment with strong acid. After completion of each coupling step, the Fmoc group of the N-terminal amino acid was removed with piperidine or 4-methylpiperidine and the resin was thoroughly washed to prepare for the coupling of the subsequent Fmoc-protected amino acid derivative.

[0395] The side chain protecting groups used were: tert-butyl (tBu) for 3Pal4CO2H, 3Pal4Ph4CO2H, alT, aMeD, aMeS, Bip4CO2H, daMeD, daMeS, hS, Phe4COOH, Phe4Pyrim5CO2H, Proc4OH, PyrimAla4Ph4CO2H, S, T; tert-butoxy-carbonyl (Boc) for Ac4cN, AlaPiperaz, aMeDab, aMeK, Dab, daMeK, K, PipH, Orn; trityl (Trt) for Q; 2,2,4,6,7-pentamethyldihydrobenzofuran-5-sulfonyl (Pbf) for R; and, β-methylpentyl ester (OMpe) for D.

[0396] Fmoc-protected amino acids were typically obtained from vendors such as Sigma-Aldrich, Novabiochem, Chem-Impex, and Combi-Block.

B. Synthetic Procedures used to Prepare Cyclic Peptides

[chemical structure]

### Solid-Phase Synthesis of Peptides Protocol A

[0397] Peptides were synthesized on a Liberty Blue™ synthesizer from CEM Corporation, using standard solid-phase synthesis using Fmoc/tBu chemistry as summarized above in Scheme 36.

[0398] N,N′-Diisopropylcarbodiimide (DIC) with ethyl cyano(hydroxyimino)acetate (Oxyma) were used as coupling agents to form the amide bond between the free amino terminus of the resin-bound protected peptide and the carboxylic acid of the Fmoc-protected amino acid.

[0399] H-Gly-loaded 2-chlorotrityl resin (200-400 mesh, 0.79 mmol/g loading, 1% cross-linked polystyrene, Novabiochem) was used for synthesis. All the amino acids were dissolved at a 0.2 M concentration in DMF (N,N-dimethylformamide). The amino acids were activated with equimolar amounts of Oxyma solution (0.5 M in DMF), and a 2-fold molar excess of DIC solution (1.0 M in DMF). Alternatively, amino acids were dissolved at a 0.125 M concentration in DMF (N,N-dimethylformamide). The amino acids were activated with equimolar amounts of Oxyma Pure solution (0.125 M in DMF; with 0.05 M DIEA), and a 2-fold molar excess of DIC solution (0.25 M in DMF). Reactions were typically performed at the 25 μmol scale.

[0400] Every synthesis cycle included: Fmoc-amino acid deprotection by 20% piperidine in DMF (90° C. microwave assisted heating, 2 min) and coupling (potentially repeated twice for difficult couplings) with Fmoc-protected amino acid/DIC/Oxyma (5, 5, and 10 eq respectively; 90° C. microwave assisted heating, 2 min or 4 min). Cycles of Fmoc deprotection and Fmoc-protected amino acid coupling were repeated with the desired monomers until the full linear peptide was formed.

### Solid-Phase Synthesis of Peptides Protocol B

[0401] Alternatively, peptides were synthesized manually on a Biotage® Syro II peptide synthesizer using standard solid-phase synthesis using Fmoc/tBu chemistry as summarized above in Scheme 36. HATU with DIPEA were used as coupling agents to create the amide bond between the free amino terminus of the resin-bound protected peptide and the carboxylic acid of the Fmoc-protected amino acid. H-Gly-loaded 2-chlorotrityl resin (200-400 mesh, 0.79 mmol/g loading, 1% cross-linked polystyrene, Novabiochem) was used for synthesis. All the amino acids were dissolved at a 0.2 M concentration in 1:1 DMF:NMP. Reactions were typically performed at the 12 μmol scale.

[0402] Every synthesis cycle included: (1) Coupling (repeated twice) with Fmoc-protected amino acid/HATU/DIPEA (4, 4 and 8 eq, respectively; rt; 15 min). The mixture was filtered, and the peptidyl resin was washed with DMF (2×1 mL); (2) Fmoc deprotection (repeated three times): 20% 4-methyl piperidine in DMF (1 mL; rt; 3 min). The mixture was filtered, and the peptidyl resin was washed with DMF (4×1 mL). Cycles of Fmoc deprotection and Fmoc-protected amino acid coupling were repeated with the desired monomers until the full linear peptide was formed.

### Selective Cleavage of Protected Peptide and Macrolactamization

[0403] For the cleavage of the protected linear peptide from the solid support, the peptidyl resin (˜16 mg) was treated with 25% hexafluoroisopropanol (HFIP) in DCM for 20 min at rt, filtered, and the solvent was removed under reduced pressure. The resulting residue was dissolved in DMF (5 mL). HATU (0.44 eq) and DIPEA (2.5 eq) were added. The mixture was stirred for 5 min at rt. Then an additional 0.66 eq of HATU was added. Upon completion of the macrolactamization, monitored by UPLC-MS, the solvent was removed under reduced pressure.

### Final Side Chain Deprotection

[0404] A solution of TFA/H₂O/TIS (90/8/2, v/v/v, 1 mL) was added to the crude protected cyclic peptide. The mixture was stirred for 10 min at rt. Cold diethyl ether (15 mL) was added to the solution. The peptide was precipitated by centrifugation (3200 rpm, −10° C.). The precipitate was washed with diethyl ether (2×10 mL) and dried under vacuum overnight to give the crude deprotected cyclic peptide as a solid.

### HPLC Purification

[0405] Purification was performed by preparative reversed-phase high performance liquid chromatography (RP-HPLC) on Waters X-Bridge Prep C18 OBD Prep column (130 Å, 5 pm, column size 19*100 mm) using a Waters MS-Directed AutoPurification HPLC/MS system. Mobile phase: (A) 0.16% TFA in HPLC water and (B) 0.16% TFA in HPLC acetonitrile; flow rate: 25 mL/min; UV wavelength λ=215 nm; gradient: 25-50% B over 5 min. Alternatively purification was performed on Waters CSH-C18 Column (19×250 mm, 5 μM) using an Agilent, with 1290 infinity II preparative LC system and LC-MSD XT mass spectrometer. Mobile phase: (A) 0.1% formic acid in HPLC water and (B) 0.1% formic acid in HPLC acetonitrile; flow rate: 25 mL/min; UV wavelength λ=215 nm; gradient: 20% B over 2.5 min, 55% B over 2.5-20 min. UV absorbing fractions containing the target m/z ions were collected and the fractions containing product were confirmed by LC/MS.

[0406] Purity of fractions were confirmed by UPLC, which was measured by a reverse phase Waters Acquity UPLC-MS system. Column: Waters XSelect CSH C18 Column (130 Å, 2.5 μm, column size 2.1*50 mm). Mobile phase: (A) 0.05% TFA in HPLC water and (B) 0.05% TFA in HPLC acetonitrile; injection volume: 1 μL; flow rate: 1 mL/min; UV wavelength λ=215 nm; gradient: 5-100% B in 5 min. Lyophilization of combined fractions containing pure peptide resulted in the final cyclized product as a powder.

### Biological Assays:

### Procedure for IL-6 Assay in MRC5 Cells

[0407] The inhibition of IL-1β induced IL-6 secretion was evaluated in MRC5 cells. Recombinant human IL-13 (BioLegend 579404) at 2×EC₈₀ concentration was prepared in seeding medium, EMEM (ATCC 30-2003) with 0.025% BSA (Sigma A9576), 1× penicillin/streptomycin (Gibco 15070-063), 1×NEAA (Gibco 11140-050), 1×GlutaMax (Gibco 35050-061), and 1× sodium pyruvate (Gibco 11360-070). 20 μL of IL-1β was added to a 384-well collagen-coated plate (Corning 354664) and pre-incubated at ambient temperature for 1 hour with 200 nL of compound dispensed using an ECHO 555 liquid handler. Human lung fibroblast MRC5 cells (ATCC CCL-171) were added at a density of 3000 cells/20 μL per well. The cells were prepared by passaging three times in growth medium, EMEM (ATCC 30-2003) with 10% fetal bovine serum (Gibco 16140-071), 1× penicillin/streptomycin (Gibco 15070-063), 1×NEAA (Gibco 11140-050), 1× GlutaMax (Gibco 35050-061), and 1×sodium pyruvate (Gibco 11360-070) in collagen-coated T175 flasks (Greiner 661950) and harvested in seeding medium after 5 minutes of 0.25% trypsin-EDTA (Gibco 25200-056) digestion. The 384-well collagen-coated plate, containing a final volume of 40 μL, was incubated at 37° C., 5% CO₂ overnight. 5 μL of the conditioned medium was transferred to a 384-well AlphaLISA plate (PerkinElmer 6005350) for detection of IL-6 using the human AlphaLISA IL-6 kit (PerkinElmer AL223F) as per the manufacturer's protocol. 20 μL of the acceptor bead/biotinylated antibody mix was added to the 384-well AlphaLISA plate and incubated for 1 hour at ambient temperature. The donor bead mix was protected from light and 25 μL was added to the plate and incubated for 30 minutes at ambient temperature. The AlphaLISA plate was read on an EnVision multimode plate reader (Perkin Elmer model 2104) using the AlphaScreen setting (laser exc at 680 nm and emis at 570 nm). Dose response curves and IC₅₀ values were analyzed using a 4-parameter logistic equation in Spotfire software (Tibco, Palo Alto, CA).

[0408] The amino acid sequences, biological activities (MRC IC₅₀s), calculated monoisotopic masses, molecular formulas, calculated molecular weights and mass spectral data ([M+2H]/2+ or [M+H]+) of Example Nos. 1-103 (SEQ ID NOS: 1-465) are provided in FIG. 1.

[0409] The disclosed subject matter is not to be limited in scope by the specific embodiments and examples described herein. Indeed, various modifications of the disclosure in addition to those described will become apparent to those skilled in the art from the foregoing description and accompanying figures. Such modifications are intended to fall within the scope of the appended claims.

[0410] All references (e.g., publications or patents or patent applications) cited herein are incorporated herein by reference in their entirety and for all purposes to the same extent as if each individual reference (e.g., publication or patent or patent application) was specifically and individually indicated to be incorporated by reference in its entirety for all purposes. Other embodiments are within the following claims.

The application's sequence listing, which the Patent Office published only in electronic form, follows.

SEQUENCE LISTING (465 sequences)

SEQ ID NO: 1 - protein, 14 aa, synthetic construct
  SITE 1: note = 4-[4-[(2S)-2-amino-2-carboxy-ethyl]phenyl]benzoic acid
  SITE 3: note = 4-[(2S)-2-amino-2-carboxy-ethyl]benzoic acid
  SITE 5: note = (2S,4R)-4-aminopyrrolidine-2-carboxylic acid
  SITE 6: note = (2S,3S)-2-amino-3-(4-chloro-1H-indol-3-yl)butanoic acid
  SITE 8: note = D-N-methyl-Alanine
  SITE 10: note = 4-[4-[(2S)-2-amino-2-carboxy-ethyl]phenyl]benzoic acid
  SITE 13: note = D-proline
  SITE 14: note = (2S,4R)-4-(4-fluorobenzyl)pyrrolidine-2-carboxylic acid
XWFGPXDXGXWGPX

SEQ ID NO: 2 - protein, 14 aa, synthetic construct
  SITE 1: note (2S)-3-[4-(2-acetamidoethoxy)phenyl]-2-amino-propanoic acid
  SITE 3: note = 4-[(2S)-2-amino-2-carboxy-ethyl]benzoic acid
  SITE 5: note = (2S,4R)-4-aminopyrrolidine-2-carboxylic acid
  SITE 6: note = (2S,3S)-2-amino-3-(4-chloro-1H-indol-3-yl)butanoic acid
  SITE 8: note = D-N-methyl-Alanine
  SITE 10: note = 4-[4-[(2S)-2-amino-2-carboxy-ethyl]phenyl]benzoic acid
  SITE 13: note = D-proline
  SITE 14: note = (2S,4R)-4-(4-fluorobenzyl)pyrrolidine-2-carboxylic acid
XWFGPXDXGXWGPX

SEQ ID NO: 3 - protein, 14 aa, synthetic construct
  SITE 1: note (2S)-3-[4-(2-acetamidoethoxy)phenyl]-2-amino-propanoic acid
  SITE 3: note = 4-[(2S)-2-amino-2-carboxy-ethyl]benzoic acid
  SITE 5: note = (2S,4R)-4-aminopyrrolidine-2-carboxylic acid
  SITE 6: note = (2S,3S)-2-amino-3-(4-chloro-1H-indol-3-yl)butanoic acid
  SITE 8: note = D-N-methyl-Alanine
  SITE 10: note = 4-[4-[(2S)-2-amino-2-carboxy-ethyl]phenyl]benzoic acid
  SITE 12: note = (S)-2-Aminopentanoic acid
  SITE 13: note = D-proline
  SITE 14: note = (2S,4R)-4-(4-fluorobenzyl)pyrrolidine-2-carboxylic acid
XWFGPXDXGXWXPX

SEQ ID NO: 4 - protein, 14 aa, synthetic construct
  SITE 1: note (2S)-3-[4-(2-acetamidoethoxy)phenyl]-2-amino-propanoic acid
  SITE 3: note = 4-[(2S)-2-amino-2-carboxy-ethyl]benzoic acid
  SITE 5: note = (2S,4R)-4-aminopyrrolidine-2-carboxylic acid
  SITE 6: note = (2S,3S)-2-amino-3-(4-chloro-1H-indol-3-yl)butanoic acid
  SITE 8: note = D-N-methyl-Alanine
  SITE 10: note = 4-[4-[(2S)-2-amino-2-carboxy-ethyl]phenyl]benzoic acid
  SITE 13: note = D-proline
  SITE 14: note = (2S,4R)-4-(4-fluorobenzyl)pyrrolidine-2-carboxylic acid
XWFGPXDXGXWLPX

SEQ ID NO: 5 - protein, 14 aa, synthetic construct
  SITE 1: note (2S)-3-[4-(2-acetamidoethoxy)phenyl]-2-amino-propanoic acid
  SITE 3: note = 4-[(2S)-2-amino-2-carboxy-ethyl]benzoic acid
  SITE 5: note = (2S,4R)-4-aminopyrrolidine-2-carboxylic acid
  SITE 6: note = (2S,3S)-2-amino-3-(4-chloro-1H-indol-3-yl)butanoic acid
  SITE 8: note = D-N-methyl-Alanine
  SITE 10: note = 4-[4-[(2S)-2-amino-2-carboxy-ethyl]phenyl]benzoic acid
  SITE 12: note = (S)-2-Aminopentanoic acid
  SITE 13: note = D-proline
  SITE 14: note = (2S,3R)-3-(3-fluorophenyl)pyrrolidine-2-carboxylic acid
XWFGPXDXGXWXPX

SEQ ID NO: 6 - protein, 14 aa, synthetic construct
  SITE 1: note (2S)-3-[4-(2-acetamidoethoxy)phenyl]-2-amino-propanoic acid
  SITE 3: note = 4-[(2S)-2-amino-2-carboxy-ethyl]benzoic acid
  SITE 5: note = (2S,4R)-4-aminopyrrolidine-2-carboxylic acid
  SITE 6: note = (2S,3S)-2-amino-3-(4-chloro-1H-indol-3-yl)butanoic acid
  SITE 8: note = D-N-methyl-Alanine
  SITE 10: note = 4-[4-[(2S)-2-amino-2-carboxy-ethyl]phenyl]benzoic acid
  SITE 13: note = D-proline
  SITE 14: note = (2S,4R)-4-(4-fluorobenzyl)pyrrolidine-2-carboxylic acid
XWFGPXDXGXWAPX

SEQ ID NO: 7 - protein, 14 aa, synthetic construct
  SITE 1: note = 4-[4-[(2S)-2-amino-2-carboxy-ethyl]phenyl]benzoic acid
  SITE 3: note = 4-[(2S)-2-amino-2-carboxy-ethyl]benzoic acid
  SITE 5: note = (2S,4R)-4-aminopyrrolidine-2-carboxylic acid
  SITE 6: note = (2S,3S)-2-amino-3-(4-fluoro-1H-indol-3-yl)butanoic acid
  SITE 8: note = D-N-methyl-Alanine
  SITE 10: note = 4-[4-[(2S)-2-amino-2-carboxy-ethyl]phenyl]benzoic acid
  SITE 13: note = (2R,4S)-4-hydroxypyrrolidine-2-carboxylic acid
  SITE 14: note = (2S,4R)-4-(4-fluorobenzyl)pyrrolidine-2-carboxylic acid
XWFGPXDXGXWGXX

SEQ ID NO: 8 - protein, 14 aa, synthetic construct
  SITE 1: note = 4-[4-[(2S)-2-amino-2-carboxy-ethyl]phenyl]benzoic acid
  SITE 3: note = 4-[(2S)-2-amino-2-carboxy-ethyl]benzoic acid
  SITE 5: note = (2S,4R)-4-aminopyrrolidine-2-carboxylic acid
  SITE 6: note = (2S,3S)-2-amino-3-(4-chloro-1H-indol-3-yl)butanoic acid
  SITE 8: note = D-N-methyl-Alanine
  SITE 10: note = 4-[4-[(2S)-2-amino-2-carboxy-ethyl]phenyl]benzoic acid
  SITE 13: note = (2R,4S)-4-hydroxypyrrolidine-2-carboxylic acid
  SITE 14: note = (2S,4R)-4-(4-fluorobenzyl)pyrrolidine-2-carboxylic acid
XWFGPXDXGXWGXX

SEQ ID NO: 9 - protein, 14 aa, synthetic construct
  SITE 1: note = 4-[4-[(2S)-2-amino-2-carboxy-ethyl]phenyl]benzoic acid
  SITE 3: note = 4-[(2S)-2-amino-2-carboxy-ethyl]benzoic acid
  SITE 5: note = (2S,4R)-4-aminopyrrolidine-2-carboxylic acid
  SITE 6: note = (2S,3S)-2-amino-3-(1-naphthyl)butanoic acid
  SITE 8: note = D-N-methyl-Alanine
  SITE 10: note = 4-[4-[(2S)-2-amino-2-carboxy-ethyl]phenyl]benzoic acid
  SITE 13: note = (2R,4S)-4-hydroxypyrrolidine-2-carboxylic acid
  SITE 14: note = (2S,4R)-4-(4-fluorobenzyl)pyrrolidine-2-carboxylic acid
XWFGPXDXGXWGXX

SEQ ID NO: 10 - protein, 14 aa, synthetic construct
  SITE 1: note (2S)-3-[4-(2-acetamidoethoxy)phenyl]-2-amino-propanoic acid
  SITE 3: note = 4-[(2S)-2-amino-2-carboxy-ethyl]benzoic acid
  SITE 5: note = (2S,4R)-4-aminopyrrolidine-2-carboxylic acid
  SITE 6: note = (2S,3S)-2-amino-3-(4-chloro-1H-indol-3-yl)butanoic acid
  SITE 8: note = (R)-piperidine-2-carboxylic acid
  SITE 10: note = 4-[4-[(2S)-2-amino-2-carboxy-ethyl]phenyl]benzoic acid
  SITE 13: note = D-proline
  SITE 14: note = (2S,4R)-4-(4-fluorobenzyl)pyrrolidine-2-carboxylic acid
XWFGPXDXGXWGPX

SEQ ID NO: 11 - protein, 14 aa, synthetic construct
  SITE 1: note (2S)-3-[4-(2-acetamidoethoxy)phenyl]-2-amino-propanoic acid
  SITE 3: note = 4-[(2S)-2-amino-2-carboxy-ethyl]benzoic acid
  SITE 5: note = (2S,4R)-4-aminopyrrolidine-2-carboxylic acid
  SITE 6: note = (2S,3S)-2-amino-3-(4-chloro-1H-indol-3-yl)butanoic acid
  SITE 8: note = D-N-methyl-Alanine
  SITE 10: note = 4-[4-[(2S)-2-amino-2-carboxy-ethyl]phenyl]benzoic acid
  SITE 13: note = D-proline
  SITE 14: note (2S,4R)-4-([1,1'-biphenyl]-4-ylmethyl)pyrrolidine-2-carboxy lic acid
XWFGPXDXGXWGPX

SEQ ID NO: 12 - protein, 14 aa, synthetic construct
  SITE 1: note (2S)-3-[4-(2-acetamidoethoxy)phenyl]-2-amino-propanoic acid
  SITE 3: note = 4-[(2S)-2-amino-2-carboxy-ethyl]benzoic acid
  SITE 5: note = (2S,4R)-4-aminopyrrolidine-2-carboxylic acid
  SITE 6: note = (2S,3S)-2-amino-3-(4-chloro-1H-indol-3-yl)butanoic acid
  SITE 8: note = D-N-methyl-Alanine
  SITE 10: note = 4-[4-[(2S)-2-amino-2-carboxy-ethyl]phenyl]benzoic acid
  SITE 13: note = (2R,4S)-4-hydroxypyrrolidine-2-carboxylic acid
  SITE 14: note (2S,4R)-4-([1,1'-biphenyl]-4-ylmethyl)pyrrolidine-2-carboxy lic acid
XWFGPXDXGXWGXX

SEQ ID NO: 13 - protein, 14 aa, synthetic construct
  SITE 1: note (2S)-3-[4-(2-acetamidoethoxy)phenyl]-2-amino-propanoic acid
  SITE 3: note = 4-[(2S)-2-amino-2-carboxy-ethyl]benzoic acid
  SITE 5: note = (2S,4R)-4-aminopyrrolidine-2-carboxylic acid
  SITE 6: note = (2S,3S)-2-amino-3-(1-naphthyl)butanoic acid
  SITE 8: note = D-N-methyl-Alanine
  SITE 10: note = 4-[4-[(2S)-2-amino-2-carboxy-ethyl]phenyl]benzoic acid
  SITE 13: note = (2R,4S)-4-hydroxypyrrolidine-2-carboxylic acid
  SITE 14: note (2S,4R)-4-([1,1'-biphenyl]-4-ylmethyl)pyrrolidine-2-carboxy lic acid
XWFGPXDXGXWGXX

SEQ ID NO: 14 - protein, 14 aa, synthetic construct
  SITE 1: note (2S)-3-[4-(2-acetamidoethoxy)phenyl]-2-amino-propanoic acid
  SITE 3: note = 4-[(2S)-2-amino-2-carboxy-ethyl]benzoic acid
  SITE 5: note = (2S,4R)-4-aminopyrrolidine-2-carboxylic acid
  SITE 6: note = (2S,3S)-2-amino-3-(4-chloro-1H-indol-3-yl)butanoic acid
  SITE 8: note = D-N-methyl-Alanine
  SITE 10: note = 4-[4-[(2S)-2-amino-2-carboxy-ethyl]phenyl]benzoic acid
  SITE 13: note = D-proline
  SITE 14: note = (2S,4R)-4-(4-(pyrimidin-5-yl)benzyl) pyrrolidine-2-carboxylic acid
XWFGPXDXGXWGPX

SEQ ID NO: 15 - protein, 14 aa, synthetic construct
  SITE 1: note (2S)-3-[4-(2-acetamidoethoxy)phenyl]-2-amino-propanoic acid
  SITE 3: note = 4-[(2S)-2-amino-2-carboxy-ethyl]benzoic acid
  SITE 5: note = (2S,4R)-4-aminopyrrolidine-2-carboxylic acid
  SITE 6: note = (2S,3S)-2-amino-3-(4-chloro-1H-indol-3-yl)butanoic acid
  SITE 8: note = D-N-methyl-Alanine
  SITE 10: note = 4-[4-[(2S)-2-amino-2-carboxy-ethyl]phenyl]benzoic acid
  SITE 13: note = (2R,4R)-4-aminopyrrolidine-2-carboxylic acid
  SITE 14: note = (2S,4R)-4-(4-fluorobenzyl)pyrrolidine-2-carboxylic acid
XWFGPXDXGXWGXX

SEQ ID NO: 16 - protein, 14 aa, synthetic construct
  SITE 1: note = 4-[4-[(2S)-2-amino-2-carboxy-ethyl]phenyl]benzoic acid
  SITE 3: note = 4-[(2S)-2-amino-2-carboxy-ethyl]benzoic acid
  SITE 5: note = (2S,4R)-4-aminopyrrolidine-2-carboxylic acid
  SITE 6: note = (2S,3S)-2-amino-3-(4-chloro-1H-indol-3-yl)butanoic acid
  SITE 8: note = D-N-methyl-Alanine
  SITE 10: note = 4-[4-[(2S)-2-amino-2-carboxy-ethyl]phenyl]benzoic acid
  SITE 13: note = D-proline
  SITE 14: note = (2S,4R)-4-(4-fluorobenzyl)pyrrolidine-2-carboxylic acid
XWFGPXDXGXKGPX

SEQ ID NO: 17 - protein, 14 aa, synthetic construct
  SITE 1: note (2S)-3-[4-(2-acetamidoethoxy)phenyl]-2-amino-propanoic acid
  SITE 3: note = 4-[(2S)-2-amino-2-carboxy-ethyl]benzoic acid
  SITE 5: note = (2S,4R)-4-aminopyrrolidine-2-carboxylic acid
  SITE 6: note = (2S,3S)-2-amino-3-(4-chloro-1H-indol-3-yl)butanoic acid
  SITE 8: note = D-N-methyl-Alanine
  SITE 10: note = 4-[4-[(2S)-2-amino-2-carboxy-ethyl]phenyl]benzoic acid
  SITE 13: note = (2R,4S)-4-aminopyrrolidine-2-carboxylic acid
  SITE 14: note = (2S,4R)-4-(4-fluorobenzyl)pyrrolidine-2-carboxylic acid
XWFGPXDXGXWGPX

SEQ ID NO: 18 - protein, 14 aa, synthetic construct
  SITE 1: note = 4-[4-[(2S)-2-amino-2-carboxy-ethyl]phenyl]benzoic acid
  SITE 3: note = 4-[(2S)-2-amino-2-carboxy-ethyl]benzoic acid
  SITE 5: note = (2S,4R)-4-aminopyrrolidine-2-carboxylic acid
  SITE 6: note = (2S,3S)-2-amino-3-(4-chloro-1H-indol-3-yl)butanoic acid
  SITE 8: note = D-N-methyl-Alanine
  SITE 10: note = 4-[4-[(2S)-2-amino-2-carboxy-ethyl]phenyl]benzoic acid
  SITE 13: note = (2R,4R)-4-aminopyrrolidine-2-carboxylic acid
  SITE 14: note = (2S,4R)-4-(4-fluorobenzyl)pyrrolidine-2-carboxylic acid
XWFGPXDXGXWGXX

SEQ ID NO: 19 - protein, 14 aa, synthetic construct
  SITE 1: note = 4-[4-[(2S)-2-amino-2-carboxy-ethyl]phenyl]benzoic acid
  SITE 3: note = 4-[(2S)-2-amino-2-carboxy-ethyl]benzoic acid
  SITE 5: note = (2S,4R)-4-aminopyrrolidine-2-carboxylic acid
  SITE 6: note = (2S,3S)-2-amino-3-(4-chloro-1H-indol-3-yl)butanoic acid
  SITE 8: note = D-N-methyl-Alanine
  SITE 10: note = 4-[4-[(2S)-2-amino-2-carboxy-ethyl]phenyl]benzoic acid
  SITE 13: note = (2R,4S)-4-aminopyrrolidine-2-carboxylic acid
  SITE 14: note = (2S,4R)-4-(4-(pyrimidin-5-yl)benzyl) pyrrolidine-2-carboxylic acid
XWFGPXDXGXWGPX

SEQ ID NO: 20 - protein, 14 aa, synthetic construct
  SITE 1: note (2S)-3-[4-(2-acetamidoethoxy)phenyl]-2-amino-propanoic acid
  SITE 3: note = 4-[(2S)-2-amino-2-carboxy-ethyl]benzoic acid
  SITE 5: note = (2S,4R)-4-aminopyrrolidine-2-carboxylic acid
  SITE 6: note = (2S,3S)-2-amino-3-(4-chloro-1H-indol-3-yl)butanoic acid
  SITE 8: note = D-N-methyl-Alanine
  SITE 10: note = 4-[4-[(2S)-2-amino-2-carboxy-ethyl]phenyl]benzoic acid
  SITE 13: note = (2R,4S)-4-aminopyrrolidine-2-carboxylic acid
  SITE 14: note = (2S,4R)-4-(4-(pyrimidin-5-yl)benzyl) pyrrolidine-2-carboxylic acid
XWFGPXDXGXWGPX

SEQ ID NO: 21 - protein, 14 aa, synthetic construct
  SITE 1: note (S)-6-((2-(4-(2-amino-2-carboxyethyl)phenoxy)ethyl)amino)-N ,N,N-trimethyl-6-oxohexan-1-aminium
  SITE 3: note = 4-[(2S)-2-amino-2-carboxy-ethyl]benzoic acid
  SITE 5: note = (2S,4R)-4-aminopyrrolidine-2-carboxylic acid
  SITE 6: note = (2S,3S)-2-amino-3-(4-chloro-1H-indol-3-yl)butanoic acid
  SITE 8: note = D-N-methyl-Alanine
  SITE 10: note = 4-[4-[(2S)-2-amino-2-carboxy-ethyl]phenyl]benzoic acid
  SITE 13: note = (2R,4S)-4-aminopyrrolidine-2-carboxylic acid
  SITE 14: note = (2S,4R)-4-(4-fluorobenzyl)pyrrolidine-2-carboxylic acid
XWFGPXDXGXWGPX

SEQ ID NO: 22 - protein, 14 aa, synthetic construct
  SITE 1: note (S)-6-((2-(4-(2-amino-2-carboxyethyl)phenoxy)ethyl)amino)-N ,N,N-trimethyl-6-oxohexan-1-aminium
  SITE 3: note = 4-[(2S)-2-amino-2-carboxy-ethyl]benzoic acid
  SITE 5: note = (2S,4R)-4-aminopyrrolidine-2-carboxylic acid
  SITE 6: note = (2S,3S)-2-amino-3-(4-chloro-1H-indol-3-yl)butanoic acid
  SITE 8: note = D-N-methyl-Alanine
  SITE 10: note = 4-[4-[(2S)-2-amino-2-carboxy-ethyl]phenyl]benzoic acid
  SITE 13: note = (2R,4S)-4-aminopyrrolidine-2-carboxylic acid
  SITE 14: note = (2S,4R)-4-(4-(pyrimidin-5-yl)benzyl) pyrrolidine-2-carboxylic acid
XWFGPXDXGXWGPX

SEQ ID NO: 23 - protein, 14 aa, synthetic construct
  SITE 1: note (2S)-3-[4-(2-acetamidoethoxy)phenyl]-2-amino-propanoic acid
  SITE 3: note = 4-[(2S)-2-amino-2-carboxy-ethyl]benzoic acid
  SITE 5: note = (2S,4R)-4-aminopyrrolidine-2-carboxylic acid
  SITE 6: note = (2S,3S)-2-amino-3-(4-chloro-1H-indol-3-yl)butanoic acid
  SITE 8: note = D-N-methyl-Alanine
  SITE 10: note = 4-[4-[(2S)-2-amino-2-carboxy-ethyl]phenyl]benzoic acid
  SITE 11: note = l-Ornithine
  SITE 13: note = D-proline
  SITE 14: note = (2S,4R)-4-(4-fluorobenzyl)pyrrolidine-2-carboxylic acid
XWFGPXDXGXXGPX

SEQ ID NO: 24 - protein, 14 aa, synthetic construct
  SITE 1: note (2S)-3-[4-(2-acetamidoethoxy)phenyl]-2-amino-propanoic acid
  SITE 3: note = 4-[(2S)-2-amino-2-carboxy-ethyl]benzoic acid
  SITE 5: note = (2S,4R)-4-aminopyrrolidine-2-carboxylic acid
  SITE 6: note = (2S,3S)-2-amino-3-(4-chloro-1H-indol-3-yl)butanoic acid
  SITE 8: note = D-N-methyl-Alanine
  SITE 10: note = 4-[4-[(2S)-2-amino-2-carboxy-ethyl]phenyl]benzoic acid
  SITE 11: note = (2S)-2,4-diaminobutanoic acid
  SITE 13: note = D-proline
  SITE 14: note = (2S,4R)-4-(4-fluorobenzyl)pyrrolidine-2-carboxylic acid
XWFGPXDXGXXGPX

SEQ ID NO: 25 - protein, 14 aa, synthetic construct
  SITE 1: note (2S)-3-[4-(2-acetamidoethoxy)phenyl]-2-amino-propanoic acid
  SITE 3: note = 4-[(2S)-2-amino-2-carboxy-ethyl]benzoic acid
  SITE 5: note = (2S,4R)-4-aminopyrrolidine-2-carboxylic acid
  SITE 6: note = (2S,3S)-2-amino-3-(4-chloro-1H-indol-3-yl)butanoic acid
  SITE 7: note = N4,N4-dimethyl-L-asparagine
  SITE 8: note = D-N-methyl-Alanine
  SITE 10: note = 4-[4-[(2S)-2-amino-2-carboxy-ethyl]phenyl]benzoic acid
  SITE 13: note = (2R,4S)-4-aminopyrrolidine-2-carboxylic acid
  SITE 14: note = (2S,4R)-4-(4-(pyrimidin-5-yl)benzyl) pyrrolidine-2-carboxylic acid
XWFGPXXXGXWGPX

SEQ ID NO: 26 - protein, 14 aa, synthetic construct
  SITE 1: note (2S)-3-[4-(2-acetamidoethoxy)phenyl]-2-amino-propanoic acid
  SITE 3: note = 4-[(2S)-2-amino-2-carboxy-ethyl]benzoic acid
  SITE 5: note = (2S,4R)-4-aminopyrrolidine-2-carboxylic acid
  SITE 6: note = (2S,3S)-2-amino-3-(4-chloro-1H-indol-3-yl)butanoic acid
  SITE 7: note = (S)-2-amino-3-(2H-tetrazol-5-yl)propanoic acid
  SITE 8: note = D-N-methyl-Alanine
  SITE 10: note = 4-[4-[(2S)-2-amino-2-carboxy-ethyl]phenyl]benzoic acid
  SITE 13: note = (2R,4S)-4-aminopyrrolidine-2-carboxylic acid
  SITE 14: note = (2S,4R)-4-(4-(pyrimidin-5-yl)benzyl) pyrrolidine-2-carboxylic acid
XWFGPXXXGXWGPX

SEQ ID NO: 27 - protein, 14 aa, synthetic construct
  SITE 1: note (2S)-3-[4-(2-acetamidoethoxy)phenyl]-2-amino-propanoic acid
  SITE 3: note = 4-[(2S)-2-amino-2-carboxy-ethyl]benzoic acid
  SITE 5: note = (2S,4R)-4-aminopyrrolidine-2-carboxylic acid
  SITE 6: note = (2S,3S)-2-amino-3-(4-chloro-1H-indol-3-yl)butanoic acid
  SITE 8: note = D-N-methyl-Alanine
  SITE 10: note = 4-[4-[(2S)-2-amino-2-carboxy-ethyl]phenyl]benzoic acid
  SITE 13: note = (2R,4S)-4-aminopyrrolidine-2-carboxylic acid
  SITE 14: note = (2S,4R)-4-(4-(pyrimidin-5-yl)benzyl) pyrrolidine-2-carboxylic acid
XWFGPXQXGXWGPX

SEQ ID NO: 28 - protein, 14 aa, synthetic construct
  SITE 1: note (2S)-3-[4-(2-acetamidoethoxy)phenyl]-2-amino-propanoic acid
  SITE 3: note = 4-[(2S)-2-amino-2-carboxy-ethyl]benzoic acid
  SITE 5: note = (2S,4R)-4-aminopyrrolidine-2-carboxylic acid
  SITE 6: note = (2S,3S)-2-amino-3-(4-chloro-1H-indol-3-yl)butanoic acid
  SITE 8: note = D-N-methyl-Alanine
  SITE 10: note = 4-[4-[(2S)-2-amino-2-carboxy-ethyl]phenyl]benzoic acid
  SITE 13: note 6-(((3S,5R)-5-carboxypyrrolidin-3-yl)amino)-N,N,N-trimethyl -6-oxohexan-1-aminium
  SITE 14: note = (2S,4R)-4-(4-(pyrimidin-5-yl)benzyl) pyrrolidine-2-carboxylic acid
XWFGPXDXGXWGXX

SEQ ID NO: 29 - protein, 14 aa, synthetic construct
  SITE 1: note (2S)-3-[4-(2-acetamidoethoxy)phenyl]-2-amino-propanoic acid
  SITE 3: note = 4-[(2S)-2-amino-2-carboxy-ethyl]benzoic acid
  SITE 5: note = (2S,4R)-4-aminopyrrolidine-2-carboxylic acid
  SITE 6: note = (2S,3S)-2-amino-3-(4-chloro-1H-indol-3-yl)butanoic acid
  SITE 8: note = D-N-methyl-Alanine
  SITE 10: note = 4-[4-[(2S)-2-amino-2-carboxy-ethyl]phenyl]benzoic acid
  SITE 13: note 6-(((3S,5R)-5-carboxypyrrolidin-3-yl)amino)-N,N,N-trimethyl -6-oxohexan-1-aminium
  SITE 14: note = (2S,4R)-4-(4-(pyrimidin-5-yl)benzyl) pyrrolidine-2-carboxylic acid
XWFGPXDXGXWGXX

SEQ ID NO: 30 - protein, 14 aa, synthetic construct
  SITE 1: note (2S)-3-[4-(2-acetamidoethoxy)phenyl]-2-amino-propanoic acid
  SITE 3: note = 4-[(2S)-2-amino-2-carboxy-ethyl]benzoic acid
  SITE 5: note = (2S,4R)-4-aminopyrrolidine-2-carboxylic acid
  SITE 6: note = (2S,3S)-2-amino-3-(4-chloro-1H-indol-3-yl)butanoic acid
  SITE 8: note = D-N-methyl-Alanine
  SITE 10: note = 4-[4-[(2S)-2-amino-2-carboxy-ethyl]phenyl]benzoic acid
  SITE 13: note = (2R,4S)-4-aminopyrrolidine-2-carboxylic acid
  SITE 14: note (2S,4R)-4-(3,4-difluorobenzyl)pyrrolidine-2-carboxylic acid
XWFGPXDXGXWGPX

SEQ ID NO: 31 - protein, 14 aa, synthetic construct
  SITE 1: note (2S)-3-[4-(2-acetamidoethoxy)phenyl]-2-amino-propanoic acid
  SITE 3: note = 4-[(2S)-2-amino-2-carboxy-ethyl]benzoic acid
  SITE 5: note = (2S,4R)-4-aminopyrrolidine-2-carboxylic acid
  SITE 6: note = (2S,3S)-2-amino-3-(4-chloro-1H-indol-3-yl)butanoic acid
  SITE 8: note = D-N-methyl-Alanine
  SITE 10: note = 4-[4-[(2S)-2-amino-2-carboxy-ethyl]phenyl]benzoic acid
  SITE 11: note (S)-2-(2-(3-((5-amino-5-carboxypentyl)amino)-3-oxopropoxy)e thoxy)-N,N,N-trimethylethan-1-aminium
  SITE 13: note = (2R,4S)-4-aminopyrrolidine-2-carboxylic acid
  SITE 14: note = (2S,4R)-4-(4-fluorobenzyl)pyrrolidine-2-carboxylic acid
XWFGPXDXGXXGPX

SEQ ID NO: 32 - protein, 14 aa, synthetic construct
  SITE 1: note (2S)-3-[4-(2-acetamidoethoxy)phenyl]-2-amino-propanoic acid
  SITE 3: note = 4-[(2S)-2-amino-2-carboxy-ethyl]benzoic acid
  SITE 5: note = (2S,4R)-4-aminopyrrolidine-2-carboxylic acid
  SITE 6: note = (2S,3S)-2-amino-3-(4-chloro-1H-indol-3-yl)butanoic acid
  SITE 8: note = D-N-methyl-Alanine
  SITE 10: note = 4-[4-[(2S)-2-amino-2-carboxy-ethyl]phenyl]benzoic acid
  SITE 11: note = l-Ornithine
  SITE 13: note = D-proline
  SITE 14: note = (2S,4R)-4-(4-(pyrimidin-5-yl)benzyl) pyrrolidine-2-carboxylic acid
XWFGPXDXGXXGPX

SEQ ID NO: 33 - protein, 14 aa, synthetic construct
  SITE 1: note (S)-2-(2-(3-((2-(4-(2-amino-2-carboxyethyl)phenoxy)ethyl)am ino)-3-oxopropoxy)ethoxy)-N,N,N-trimethylethan-1-aminium
  SITE 3: note = 4-[(2S)-2-amino-2-carboxy-ethyl]benzoic acid
  SITE 5: note = (2S,4R)-4-aminopyrrolidine-2-carboxylic acid
  SITE 6: note = (2S,3S)-2-amino-3-(4-chloro-1H-indol-3-yl)butanoic acid
  SITE 8: note = D-N-methyl-Alanine
  SITE 10: note = 4-[4-[(2S)-2-amino-2-carboxy-ethyl]phenyl]benzoic acid
  SITE 13: note = (2R,4S)-4-aminopyrrolidine-2-carboxylic acid
  SITE 14: note = (2S,4R)-4-(4-(pyrimidin-5-yl)benzyl) pyrrolidine-2-carboxylic acid
XWFGPXDXGXWGPX

SEQ ID NO: 34 - protein, 14 aa, synthetic construct
  SITE 1: note (S)-2-(2-(3-((2-(4-(2-amino-2-carboxyethyl)phenoxy)ethyl)am ino)-3-oxopropoxy)ethoxy)-N,N,N-trimethylethan-1-aminium
  SITE 3: note = 4-[(2S)-2-amino-2-carboxy-ethyl]benzoic acid
  SITE 5: note = (2S,4R)-4-aminopyrrolidine-2-carboxylic acid
  SITE 6: note = (2S,3S)-2-amino-3-(4-chloro-1H-indol-3-yl)butanoic acid
  SITE 8: note = D-N-methyl-Alanine
  SITE 10: note = 4-[4-[(2S)-2-amino-2-carboxy-ethyl]phenyl]benzoic acid
  SITE 13: note = (2R,4S)-4-aminopyrrolidine-2-carboxylic acid
  SITE 14: note = (2S,4R)-4-(4-fluorobenzyl)pyrrolidine-2-carboxylic acid
XWFGPXDXGXWGPX

SEQ ID NO: 35 - protein, 14 aa, synthetic construct
  SITE 1: note (2S)-3-[4-(2-acetamidoethoxy)phenyl]-2-amino-propanoic acid
  SITE 3: note = 4-[(2S)-2-amino-2-carboxy-ethyl]benzoic acid
  SITE 5: note = (2S,4R)-4-aminopyrrolidine-2-carboxylic acid
  SITE 6: note = (2S,3S)-2-amino-3-(4-chloro-1H-indol-3-yl)butanoic acid
  SITE 8: note = D-N-methyl-Alanine
  SITE 10: note = 4-[4-[(2S)-2-amino-2-carboxy-ethyl]phenyl]benzoic acid
  SITE 11: note = l-Ornithine
  SITE 13: note 2-(2-(3-(((3S,5R)-5-carboxypyrrolidin-3-yl)amino)-3-oxoprop oxy)ethoxy)-N,N,N-trimethylethan-1-aminium
  SITE 14: note = (2S,4R)-4-(4-fluorobenzyl)pyrrolidine-2-carboxylic acid
XWFGPXDXGXXGXX

SEQ ID NO: 36 - protein, 14 aa, synthetic construct
  SITE 1: note (S)-4-((2-(4-(2-amino-2-carboxyethyl)phenoxy)ethyl)amino)-N ,N,N-trimethyl-4-oxobutan-1-aminium
  SITE 3: note = 4-[(2S)-2-amino-2-carboxy-ethyl]benzoic acid
  SITE 5: note = (2S,4R)-4-aminopyrrolidine-2-carboxylic acid
  SITE 6: note = (2S,3S)-2-amino-3-(4-chloro-1H-indol-3-yl)butanoic acid
  SITE 8: note = D-N-methyl-Alanine
  SITE 10: note = 4-[4-[(2S)-2-amino-2-carboxy-ethyl]phenyl]benzoic acid
  SITE 13: note = (2R,4S)-4-aminopyrrolidine-2-carboxylic acid
  SITE 14: note = (2S,4R)-4-(4-(pyrimidin-5-yl)benzyl) pyrrolidine-2-carboxylic acid
XWFGPXDXGXWGPX

SEQ ID NO: 37 - protein, 14 aa, synthetic construct
  SITE 1: note (S)-4-((2-(4-(2-amino-2-carboxyethyl)phenoxy)ethyl)amino)-N ,N,N-trimethyl-4-oxobutan-1-aminium
  SITE 3: note = 4-[(2S)-2-amino-2-carboxy-ethyl]benzoic acid
  SITE 5: note = (2S,4R)-4-aminopyrrolidine-2-carboxylic acid
  SITE 6: note = (2S,3S)-2-amino-3-(4-chloro-1H-indol-3-yl)butanoic acid
  SITE 8: note = D-N-methyl-Alanine
  SITE 10: note = 4-[4-[(2S)-2-amino-2-carboxy-ethyl]phenyl]benzoic acid
  SITE 13: note = (2R,4S)-4-aminopyrrolidine-2-carboxylic acid
  SITE 14: note = (2S,4R)-4-(4-fluorobenzyl)pyrrolidine-2-carboxylic acid
XWFGPXDXGXWGPX

SEQ ID NO: 38 - protein, 14 aa, synthetic construct
  SITE 1: note (S)-6-((2-(4-(2-amino-2-carboxyethyl)phenoxy)ethyl)amino)-N ,N,N-trimethyl-6-oxohexan-1-aminium
  SITE 3: note = 4-[(2S)-2-amino-2-carboxy-ethyl]benzoic acid
  SITE 5: note = (2S,4R)-4-aminopyrrolidine-2-carboxylic acid
  SITE 6: note = (2S,3S)-2-amino-3-(4-chloro-1H-indol-3-yl)butanoic acid
  SITE 8: note = D-N-methyl-Alanine
  SITE 10: note 4-[5-[(2S)-2-amino-2-carboxy-ethyl]pyrimidin-2-yl]benzoic acid
  SITE 11: note = (2S)-2,4-diaminobutanoic acid
  SITE 13: note = D-proline
  SITE 14: note = (2S,4R)-4-(4-fluorobenzyl)pyrrolidine-2-carboxylic acid
XWFGPXDXGXXGPX

SEQ ID NO: 39 - protein, 14 aa, synthetic construct
  SITE 1: note (S)-6-((2-(4-(2-amino-2-carboxyethyl)phenoxy)ethyl)amino)-N ,N,N-trimethyl-6-oxohexan-1-aminium
  SITE 3: note = 4-[(2S)-2-amino-2-carboxy-ethyl]benzoic acid
  SITE 5: note = (2S,4R)-4-aminopyrrolidine-2-carboxylic acid
  SITE 6: note = (2S,3S)-2-amino-3-(4-chloro-1H-indol-3-yl)butanoic acid
  SITE 8: note = D-N-methyl-Alanine
  SITE 10: note 4-[5-[(2S)-2-amino-2-carboxy-ethyl]pyrimidin-2-yl]benzoic acid
  SITE 11: note = (2S)-2,4-diaminobutanoic acid
  SITE 13: note = D-proline
  SITE 14: note (2S,4R)-4-(3,4-difluorobenzyl)pyrrolidine-2-carboxylic acid
XWFGPXDXGXXGPX

SEQ ID NO: 40 - protein, 14 aa, synthetic construct
  SITE 1: note (2S)-3-[4-(2-acetamidoethoxy)phenyl]-2-amino-propanoic acid
  SITE 3: note = 4-[(2S)-2-amino-2-carboxy-ethyl]benzoic acid
  SITE 5: note = (2S,4R)-4-aminopyrrolidine-2-carboxylic acid
  SITE 6: note = (2S,3S)-2-amino-3-(4-chloro-1H-indol-3-yl)butanoic acid
  SITE 8: note = D-N-methyl-Alanine
  SITE 10: note 4-[5-[(2S)-2-amino-2-carboxy-ethyl]-2-pyridyl]benzoic acid
  SITE 11: note = l-Ornithine
  SITE 13: note = D-proline
  SITE 14: note = (2S,4R)-4-(4-fluorobenzyl)pyrrolidine-2-carboxylic acid
XWFGPXDXGXXGPX

SEQ ID NO: 41 - protein, 14 aa, synthetic construct
  SITE 1: note (S)-6-((2-(4-(2-amino-2-carboxyethyl)phenoxy)ethyl)amino)-N ,N,N-trimethyl-6-oxohexan-1-aminium
  SITE 3: note = 4-[(2S)-2-amino-2-carboxy-ethyl]benzoic acid
  SITE 5: note = (2S,4R)-4-aminopyrrolidine-2-carboxylic acid
  SITE 6: note = (2S,3S)-2-amino-3-(4-chloro-1H-indol-3-yl)butanoic acid
  SITE 8: note = D-N-methyl-Alanine
  SITE 10: note 4-[5-[(2S)-2-amino-2-carboxy-ethyl]-2-pyridyl]benzoic acid
  SITE 11: note = (2S)-2,4-diaminobutanoic acid
  SITE 13: note = D-proline
  SITE 14: note = (2S,4R)-4-(4-fluorobenzyl)pyrrolidine-2-carboxylic acid
XWFGPXDXGXXGPX

SEQ ID NO: 42 - protein, 14 aa, synthetic construct
  SITE 1: note (2S)-3-[4-(2-acetamidoethoxy)phenyl]-2-amino-propanoic acid
  SITE 3: note = 4-[(2S)-2-amino-2-carboxy-ethyl]benzoic acid
  SITE 5: note = (2S,4R)-4-aminopyrrolidine-2-carboxylic acid
  SITE 6: note = (2S,3S)-2-amino-3-(4-chloro-1H-indol-3-yl)butanoic acid
  SITE 8: note = D-N-methyl-Alanine
  SITE 10: note 4-[5-[(2S)-2-amino-2-carboxy-ethyl]-2-pyridyl]benzoic acid
  SITE 11: note = (2S)-2,4-diaminobutanoic acid
  SITE 13: note 6-(((3S,5R)-5-carboxypyrrolidin-3-yl)amino)-N,N,N-trimethyl -6-oxohexan-1-aminium
  SITE 14: note = (2S,4R)-4-(4-fluorobenzyl)pyrrolidine-2-carboxylic acid
XWFGPXDXGXXGXX

SEQ ID NO: 43 - protein, 14 aa, synthetic construct
  SITE 1: note (2S)-3-[4-(2-acetamidoethoxy)phenyl]-2-amino-propanoic acid
  SITE 3: note = 4-[(2S)-2-amino-2-carboxy-ethyl]benzoic acid
  SITE 5: note = (2S,4R)-4-aminopyrrolidine-2-carboxylic acid
  SITE 6: note = (2S,3S)-2-amino-3-(4-chloro-1H-indol-3-yl)butanoic acid
  SITE 8: note = D-N-methyl-Alanine
  SITE 10: note = 4-[4-[(2S)-2-amino-2-carboxy-ethyl]phenyl]benzoic acid
  SITE 11: note = l-Ornithine
  SITE 13: note 6-(((3S,5R)-5-carboxypyrrolidin-3-yl)amino)-N,N,N-trimethyl -6-oxohexan-1-aminium
  SITE 14: note = (2S,4R)-4-(4-fluorobenzyl)pyrrolidine-2-carboxylic acid
XWFGPXDXGXXGXX

SEQ ID NO: 44 - protein, 14 aa, synthetic construct
  SITE 1: note (2S)-3-[4-(2-acetamidoethoxy)phenyl]-2-amino-propanoic acid
  SITE 3: note = 4-[(2S)-2-amino-2-carboxy-ethyl]benzoic acid
  SITE 5: note = (2S,4R)-4-aminopyrrolidine-2-carboxylic acid
  SITE 6: note = (2S,3S)-2-amino-3-(4-chloro-1H-indol-3-yl)butanoic acid
  SITE 7: note = (S)-2-amino-3-(2H-tetrazol-5-yl)propanoic acid
  SITE 8: note = D-N-methyl-Alanine
  SITE 10: note = 4-[4-[(2S)-2-amino-2-carboxy-ethyl]phenyl]benzoic acid
  SITE 11: note = l-Ornithine
  SITE 13: note 6-(((3S,5R)-5-carboxypyrrolidin-3-yl)amino)-N,N,N-trimethyl -6-oxohexan-1-aminium
  SITE 14: note = (2S,4R)-4-(4-fluorobenzyl)pyrrolidine-2-carboxylic acid
XWFGPXXXGXXGXX

SEQ ID NO: 45 - protein, 14 aa, synthetic construct
  SITE 1: note (S)-2-(3-((2-(4-(2-amino-2-carboxyethyl)phenoxy)ethyl)amino )-3-oxopropoxy)-N,N,N-trimethylethan-1-aminium
  SITE 3: note = 4-[(2S)-2-amino-2-carboxy-ethyl]benzoic acid
  SITE 5: note = (2S,4R)-4-aminopyrrolidine-2-carboxylic acid
  SITE 6: note = (2S,3S)-2-amino-3-(4-chloro-1H-indol-3-yl)butanoic acid
  SITE 8: note = D-N-methyl-Alanine
  SITE 10: note = 4-[4-[(2S)-2-amino-2-carboxy-ethyl]phenyl]benzoic acid
  SITE 11: note = l-Ornithine
  SITE 13: note = D-proline
  SITE 14: note = (2S,4R)-4-(4-fluorobenzyl)pyrrolidine-2-carboxylic acid
XWFGPXDXGXXGPX

SEQ ID NO: 46 - protein, 14 aa, synthetic construct
  SITE 1: note (2S)-3-[4-(2-acetamidoethoxy)phenyl]-2-amino-propanoic acid
  SITE 3: note = 4-[(2S)-2-amino-2-carboxy-ethyl]benzoic acid
  SITE 5: note = (2S,4R)-4-aminopyrrolidine-2-carboxylic acid
  SITE 6: note = (2S,3S)-2-amino-3-(4-chloro-1H-indol-3-yl)butanoic acid
  SITE 8: note = D-N-methyl-Alanine
  SITE 10: note 4-[5-[(2S)-2-amino-2-carboxy-ethyl]pyrimidin-2-yl]benzoic acid
  SITE 11: note = l-Ornithine
  SITE 13: note = D-proline
  SITE 14: note = (2S,4R)-4-(4-fluorobenzyl)pyrrolidine-2-carboxylic acid
XWFGPXDXGXXGPX

SEQ ID NO: 47 - protein, 14 aa, synthetic construct
  SITE 1: note (2S)-3-[4-(2-acetamidoethoxy)phenyl]-2-amino-propanoic acid
  SITE 3: note = 4-[(2S)-2-amino-2-carboxy-ethyl]benzoic acid
  SITE 5: note = (2S,4R)-4-aminopyrrolidine-2-carboxylic acid
  SITE 6: note = (2S,3S)-2-amino-3-(4-chloro-1H-indol-3-yl)butanoic acid
  SITE 8: note = D-N-methyl-Alanine
  SITE 10: note 4-[5-[(2S)-2-amino-2-carboxy-ethyl]pyrimidin-2-yl]benzoic acid
  SITE 13: note = (2R,4S)-4-aminopyrrolidine-2-carboxylic acid
  SITE 14: note = (2S,4R)-4-(4-fluorobenzyl)pyrrolidine-2-carboxylic acid
XWFGPXDXGXWGPX

SEQ ID NO: 48 - protein, 14 aa, synthetic construct
  SITE 1: note (S)-2-(3-((2-(4-(2-amino-2-carboxyethyl)phenoxy)ethyl)amino )-3-oxopropoxy)-N,N,N-trimethylethan-1-aminium
  SITE 3: note = 4-[(2S)-2-amino-2-carboxy-ethyl]benzoic acid
  SITE 5: note = (2S,4R)-4-aminopyrrolidine-2-carboxylic acid
  SITE 6: note = (2S,3S)-2-amino-3-(4-chloro-1H-indol-3-yl)butanoic acid
  SITE 7: note = (S)-2-amino-3-(2H-tetrazol-5-yl)propanoic acid
  SITE 8: note = D-N-methyl-Alanine
  SITE 10: note = 4-[4-[(2S)-2-amino-2-carboxy-ethyl]phenyl]benzoic acid
  SITE 11: note = l-Ornithine
  SITE 13: note = D-proline
  SITE 14: note = (2S,4R)-4-(4-fluorobenzyl)pyrrolidine-2-carboxylic acid
XWFGPXXXGXXGPX

SEQ ID NO: 49 - protein, 14 aa, synthetic construct
  SITE 1: note (2S)-3-[4-(2-acetamidoethoxy)phenyl]-2-amino-propanoic acid
  SITE 3: note = 4-[(2S)-2-amino-2-carboxy-ethyl]benzoic acid
  SITE 5: note = (2S,4R)-4-aminopyrrolidine-2-carboxylic acid
  SITE 6: note = (2S,3S)-2-amino-3-(4-chloro-1H-indol-3-yl)butanoic acid
  SITE 7: note = (S)-2-amino-3-(2H-tetrazol-5-yl)propanoic acid
  SITE 8: note = D-N-methyl-Alanine
  SITE 10: note = 4-[4-[(2S)-2-amino-2-carboxy-ethyl]phenyl]benzoic acid
  SITE 11: note = l-Ornithine
  SITE 13: note 6-(((3S,5R)-5-carboxypyrrolidin-3-yl)amino)-N,N,N-trimethyl -6-oxohexan-1-aminium
  SITE 14: note = (2S,4R)-4-(4-(pyrimidin-5-yl)benzyl) pyrrolidine-2-carboxylic acid
XWFGPXXXGXXGXX

SEQ ID NO: 50 - protein, 14 aa, synthetic construct
  SITE 1: note (S)-2-(3-((2-(4-(2-amino-2-carboxyethyl)phenoxy)ethyl)amino )-3-oxopropoxy)-N,N,N-trimethylethan-1-aminium
  SITE 3: note = 4-[(2S)-2-amino-2-carboxy-ethyl]benzoic acid
  SITE 5: note = (2S,4R)-4-aminopyrrolidine-2-carboxylic acid
  SITE 6: note = (2S,3S)-2-amino-3-(4-chloro-1H-indol-3-yl)butanoic acid
  SITE 7: note = (S)-2-amino-3-(2H-tetrazol-5-yl)propanoic acid
  SITE 8: note = D-N-methyl-Alanine
  SITE 10: note = 4-[4-[(2S)-2-amino-2-carboxy-ethyl]phenyl]benzoic acid
  SITE 11: note = l-Ornithine
  SITE 13: note = D-proline
  SITE 14: note (2S,4R)-4-(3,4-difluorobenzyl)pyrrolidine-2-carboxylic acid
XWFGPXXXGXXGPX

SEQ ID NO: 51 - protein, 14 aa, synthetic construct
  SITE 1: note (S)-2-(2-(3-((2-(4-(2-amino-2-carboxyethyl)phenoxy)ethyl)am ino)-3-oxopropoxy)ethoxy)-N,N,N-trimethylethan-1-aminium
  SITE 3: note = 4-[(2S)-2-amino-2-carboxy-ethyl]benzoic acid
  SITE 5: note = (2S,4R)-4-aminopyrrolidine-2-carboxylic acid
  SITE 6: note = (2S,3S)-2-amino-3-(4-chloro-1H-indol-3-yl)butanoic acid
  SITE 7: note = (S)-2-amino-3-(2H-tetrazol-5-yl)propanoic acid
  SITE 8: note = D-N-methyl-Alanine
  SITE 10: note = 4-[4-[(2S)-2-amino-2-carboxy-ethyl]phenyl]benzoic acid
  SITE 11: note = l-Ornithine
  SITE 13: note = D-proline
  SITE 14: note (2S,4R)-4-(3,4-difluorobenzyl)pyrrolidine-2-carboxylic acid
XWFGPXXXGXXGPX

SEQ ID NO: 52 - protein, 14 aa, synthetic construct
  SITE 1: note (S)-2-(2-(3-((2-(4-(2-amino-2-carboxyethyl)phenoxy)ethyl)am ino)-3-oxopropoxy)ethoxy)-N,N,N-trimethylethan-1-aminium
  SITE 3: note = 4-[(2S)-2-amino-2-carboxy-ethyl]benzoic acid
  SITE 5: note = (2S,4R)-4-aminopyrrolidine-2-carboxylic acid
  SITE 6: note = (2S,3S)-2-amino-3-(4-chloro-1H-indol-3-yl)butanoic acid
  SITE 8: note = D-N-methyl-Alanine
  SITE 10: note 4-[5-[(2S)-2-amino-2-carboxy-ethyl]pyrimidin-2-yl]benzoic acid
  SITE 13: note = (2R,4S)-4-aminopyrrolidine-2-carboxylic acid
  SITE 14: note = (2S,4R)-4-(4-fluorobenzyl)pyrrolidine-2-carboxylic acid
XWFGPXDXGXWGPX

SEQ ID NO: 53 - protein, 14 aa, synthetic construct
  SITE 1: note (2S)-3-[4-(2-acetamidoethoxy)phenyl]-2-amino-propanoic acid
  SITE 3: note = 4-[(2S)-2-amino-2-carboxy-ethyl]benzoic acid
  SITE 5: note = (2S,4R)-4-aminopyrrolidine-2-carboxylic acid
  SITE 6: note = (2S,3S)-2-amino-3-(4-chloro-1H-indol-3-yl)butanoic acid
  SITE 8: note = D-N-methyl-Alanine
  SITE 10: note 4-[5-[(2S)-2-amino-2-carboxy-ethyl]pyrimidin-2-yl]benzoic acid
  SITE 13: note = (2R,4S)-4-aminopyrrolidine-2-carboxylic acid
  SITE 14: note (2S,4R)-4-(3,4-difluorobenzyl)pyrrolidine-2-carboxylic acid
XWFGPXDXGXWGPX

SEQ ID NO: 54 - protein, 14 aa, synthetic construct
  SITE 1: note (2S)-3-[4-(2-acetamidoethoxy)phenyl]-2-amino-propanoic acid
  SITE 3: note = 4-[(2S)-2-amino-2-carboxy-ethyl]benzoic acid
  SITE 5: note = (2S,4R)-4-aminopyrrolidine-2-carboxylic acid
  SITE 6: note = (2S,3S)-2-amino-3-(4-chloro-1H-indol-3-yl)butanoic acid
  SITE 8: note = D-N-methyl-Alanine
  SITE 10: note 4-[5-[(2S)-2-amino-2-carboxy-ethyl]-2-pyridyl]benzoic acid
  SITE 13: note = (2R,4S)-4-aminopyrrolidine-2-carboxylic acid
  SITE 14: note = (2S,4R)-4-(4-fluorobenzyl)pyrrolidine-2-carboxylic acid
XWFGPXDXGXWGPX

SEQ ID NO: 55 - protein, 14 aa, synthetic construct
  SITE 1: note (S)-2-(3-((2-(4-(2-amino-2-carboxyethyl)phenoxy)ethyl)amino )-3-oxopropoxy)-N,N,N-trimethylethan-1-aminium
  SITE 3: note = 4-[(2S)-2-amino-2-carboxy-ethyl]benzoic acid
  SITE 5: note = (2S,4R)-4-aminopyrrolidine-2-carboxylic acid
  SITE 6: note = (2S,3S)-2-amino-3-(4-chloro-1H-indol-3-yl)butanoic acid
  SITE 8: note = D-N-methyl-Alanine
  SITE 10: note 4-[5-[(2S)-2-amino-2-carboxy-ethyl]pyrimidin-2-yl]benzoic acid
  SITE 13: note = (2R,4S)-4-aminopyrrolidine-2-carboxylic acid
  SITE 14: note = (2S,4R)-4-(4-fluorobenzyl)pyrrolidine-2-carboxylic acid
XWFGPXDXGXWGPX

SEQ ID NO: 56 - protein, 14 aa, synthetic construct
  SITE 1: note (2S)-3-[4-(2-acetamidoethoxy)phenyl]-2-amino-propanoic acid
  SITE 3: note = 4-[(2S)-2-amino-2-carboxy-ethyl]benzoic acid
  SITE 5: note = (2S,4R)-4-aminopyrrolidine-2-carboxylic acid
  SITE 6: note = (2S,3S)-2-amino-3-(4-chloro-1H-indol-3-yl)butanoic acid
  SITE 8: note = D-N-methyl-Alanine
  SITE 10: note = 4-[4-[(2S)-2-amino-2-carboxy-ethyl]phenyl]benzoic acid
  SITE 13: note = (2R,4S)-4-aminopyrrolidine-2-carboxylic acid
  SITE 14: note = (2S,4R)-4-(4-fluorobenzyl)pyrrolidine-2-carboxylic acid
XWFGPXDXGXYGPX

SEQ ID NO: 57 - protein, 14 aa, synthetic construct
  SITE 1: note (S)-2-(3-((2-(4-(2-amino-2-carboxyethyl)phenoxy)ethyl)amino )-3-oxopropoxy)-N,N,N-trimethylethan-1-aminium
  SITE 3: note = 4-[(2S)-2-amino-2-carboxy-ethyl]benzoic acid
  SITE 5: note = (2S,4R)-4-aminopyrrolidine-2-carboxylic acid
  SITE 6: note = (2S,3S)-2-amino-3-(1-naphthyl)butanoic acid
  SITE 8: note = D-N-methyl-Alanine
  SITE 10: note 4-[5-[(2S)-2-amino-2-carboxy-ethyl]-2-pyridyl]benzoic acid
  SITE 13: note = (2R,4S)-4-aminopyrrolidine-2-carboxylic acid
  SITE 14: note = (2S,4R)-4-(4-fluorobenzyl)pyrrolidine-2-carboxylic acid
XWFGPXDXGXWGPX

SEQ ID NO: 58 - protein, 14 aa, synthetic construct
  SITE 1: note (S)-2-(3-((2-(4-(2-amino-2-carboxyethyl)phenoxy)ethyl)amino )-3-oxopropoxy)-N,N,N-trimethylethan-1-aminium
  SITE 3: note = 4-[(2S)-2-amino-2-carboxy-ethyl]benzoic acid
  SITE 5: note = (2S,4R)-4-aminopyrrolidine-2-carboxylic acid
  SITE 6: note = (2S,3S)-2-amino-3-(1-naphthyl)butanoic acid
  SITE 8: note = D-N-methyl-Alanine
  SITE 10: note = 4-[4-[(2S)-2-amino-2-carboxy-ethyl]phenyl]benzoic acid
  SITE 13: note = (2R,4S)-4-aminopyrrolidine-2-carboxylic acid
  SITE 14: note = (2S,4R)-4-(4-fluorobenzyl)pyrrolidine-2-carboxylic acid
XWFGPXDXGXWGPX

SEQ ID NO: 59 - protein, 14 aa, synthetic construct
  SITE 1: note (2S)-3-[4-(2-acetamidoethoxy)phenyl]-2-amino-propanoic acid
  SITE 3: note = 4-[(2S)-2-amino-2-carboxy-ethyl]benzoic acid
  SITE 5: note = (2S,4R)-4-aminopyrrolidine-2-carboxylic acid
  SITE 6: note = (2S,3S)-2-amino-3-(1-naphthyl)butanoic acid
  SITE 8: note = D-N-methyl-Alanine
  SITE 10: note 4-[5-[(2S)-2-amino-2-carboxy-ethyl]-2-pyridyl]benzoic acid
  SITE 13: note = (2R,4S)-4-aminopyrrolidine-2-carboxylic acid
  SITE 14: note = (2S,4R)-4-(4-fluorobenzyl)pyrrolidine-2-carboxylic acid
XWFGPXDXGXWGPX

SEQ ID NO: 60 - protein, 14 aa, synthetic construct
  SITE 1: note = 4-[4-[(2S)-2-amino-2-carboxy-ethyl]phenyl]benzoic acid
  SITE 3: note = 4-[(2S)-2-amino-2-carboxy-ethyl]benzoic acid
  SITE 5: note = (2S,4R)-4-aminopyrrolidine-2-carboxylic acid
  SITE 6: note = (2S,3S)-2-amino-3-(1-naphthyl)butanoic acid
  SITE 7: note = (S)-2-amino-3-(2H-tetrazol-5-yl)propanoic acid
  SITE 8: note = D-N-methyl-Alanine
  SITE 10: note = 4-[4-[(2S)-2-amino-2-carboxy-ethyl]phenyl]benzoic acid
  SITE 11: note = l-Ornithine
  SITE 13: note = (2R,4S)-4-aminopyrrolidine-2-carboxylic acid
  SITE 14: note = (2S,4R)-4-(4-fluorobenzyl)pyrrolidine-2-carboxylic acid
XWFGPXXXGXXGPX

SEQ ID NO: 61 - protein, 14 aa, synthetic construct
  SITE 1: note (2S)-3-[4-(2-acetamidoethoxy)phenyl]-2-amino-propanoic acid
  SITE 3: note = 4-[(2S)-2-amino-2-carboxy-ethyl]benzoic acid
  SITE 5: note = (2S,4R)-4-aminopyrrolidine-2-carboxylic acid
  SITE 6: note = (2S,3S)-2-amino-3-(1-naphthyl)butanoic acid
  SITE 7: note = (S)-2-amino-3-(2H-tetrazol-5-yl)propanoic acid
  SITE 8: note = D-N-methyl-Alanine
  SITE 10: note = 4-[4-[(2S)-2-amino-2-carboxy-ethyl]phenyl]benzoic acid
  SITE 11: note = l-Ornithine
  SITE 13: note 6-(((3S,5R)-5-carboxypyrrolidin-3-yl)amino)-N,N,N-trimethyl -6-oxohexan-1-aminium
  SITE 14: note = (2S,4R)-4-(4-fluorobenzyl)pyrrolidine-2-carboxylic acid
XWFGPXXXGXXGXX

SEQ ID NO: 62 - protein, 14 aa, synthetic construct
  SITE 1: note (S)-6-((2-(4-(2-amino-2-carboxyethyl)phenoxy)ethyl)amino)-N ,N,N-trimethyl-6-oxohexan-1-aminium
  SITE 3: note = 4-[(2S)-2-amino-2-carboxy-ethyl]benzoic acid
  SITE 5: note = (2S,4R)-4-aminopyrrolidine-2-carboxylic acid
  SITE 6: note = (2S,3S)-2-amino-3-(1-naphthyl)butanoic acid
  SITE 8: note = D-N-methyl-Alanine
  SITE 10: note 4-[5-[(2S)-2-amino-2-carboxy-ethyl]-2-pyridyl]benzoic acid
  SITE 13: note = (2R,4S)-4-aminopyrrolidine-2-carboxylic acid
  SITE 14: note = (2S,4R)-4-(4-fluorobenzyl)pyrrolidine-2-carboxylic acid
XWFGPXDXGXWGPX

SEQ ID NO: 63 - protein, 14 aa, synthetic construct
  SITE 1: note (S)-6-((2-(4-(2-amino-2-carboxyethyl)phenoxy)ethyl)amino)-N ,N,N-trimethyl-6-oxohexan-1-aminium
  SITE 3: note = 4-[(2S)-2-amino-2-carboxy-ethyl]benzoic acid
  SITE 5: note = (2S,4R)-4-aminopyrrolidine-2-carboxylic acid
  SITE 6: note = (2S,3S)-2-amino-3-(1-naphthyl)butanoic acid
  SITE 8: note = D-N-methyl-Alanine
  SITE 10: note 4-[5-[(2S)-2-amino-2-carboxy-ethyl]pyrimidin-2-yl]benzoic acid
  SITE 13: note = (2R,4S)-4-aminopyrrolidine-2-carboxylic acid
  SITE 14: note = (2S,4R)-4-(4-fluorobenzyl)pyrrolidine-2-carboxylic acid
XWFGPXDXGXWGPX

SEQ ID NO: 64 - protein, 14 aa, synthetic construct
  SITE 1: note (2S)-3-[4-(2-acetamidoethoxy)phenyl]-2-amino-propanoic acid
  SITE 3: note = 4-[(2S)-2-amino-2-carboxy-ethyl]benzoic acid
  SITE 5: note = (2S,4R)-4-aminopyrrolidine-2-carboxylic acid
  SITE 6: note = (2S,3S)-2-amino-3-(4-chloro-1H-indol-3-yl)butanoic acid
  SITE 8: note = D-N-methyl-Alanine
  SITE 10: note = 4-[4-[(2S)-2-amino-2-carboxy-ethyl]phenyl]benzoic acid
  SITE 13: note = (2R,4S)-4-aminopyrrolidine-2-carboxylic acid
  SITE 14: note (2S,4R)-4-(pyrimidin-5-ylmethyl)pyrrolidine-2-carboxylic acid
XWFGPXDXGXWGPX

SEQ ID NO: 65 - protein, 14 aa, synthetic construct
  SITE 1: note (2S)-3-[4-(2-acetamidoethoxy)phenyl]-2-amino-propanoic acid
  SITE 3: note = 4-[(2S)-2-amino-2-carboxy-ethyl]benzoic acid
  SITE 5: note = (2S,4R)-4-aminopyrrolidine-2-carboxylic acid
  SITE 6: note = (2S,3S)-2-amino-3-(4-chloro-1H-indol-3-yl)butanoic acid
  SITE 8: note = D-N-methyl-Alanine
  SITE 10: note = 4-[4-[(2S)-2-amino-2-carboxy-ethyl]phenyl]benzoic acid
  SITE 11: note = (2S)-2-amino-3-(4-pyridyl)propanoic acid
  SITE 13: note = (2R,4S)-4-aminopyrrolidine-2-carboxylic acid
  SITE 14: note = (2S,4R)-4-(4-fluorobenzyl)pyrrolidine-2-carboxylic acid
XWFGPXDXGXXGPX

SEQ ID NO: 66 - protein, 14 aa, synthetic construct
  SITE 1: note (2S)-3-[4-(2-acetamidoethoxy)phenyl]-2-amino-propanoic acid
  SITE 3: note = 4-[(2S)-2-amino-2-carboxy-ethyl]benzoic acid
  SITE 5: note = (2S,4R)-4-aminopyrrolidine-2-carboxylic acid
  SITE 6: note = (2S,3S)-2-amino-3-(1-naphthyl)butanoic acid
  SITE 8: note = D-N-methyl-Alanine
  SITE 10: note 4-[5-[(2S)-2-amino-2-carboxy-ethyl]pyrimidin-2-yl]benzoic acid
  SITE 13: note = (2R,4S)-4-aminopyrrolidine-2-carboxylic acid
  SITE 14: note = (2S,4R)-4-(4-fluorobenzyl)pyrrolidine-2-carboxylic acid
XWFGPXDXGXWGPX

SEQ ID NO: 67 - protein, 14 aa, synthetic construct
  SITE 1: note (2S)-3-[4-(2-acetamidoethoxy)phenyl]-2-amino-propanoic acid
  SITE 3: note = 4-[(2S)-2-amino-2-carboxy-ethyl]benzoic acid
  SITE 5: note = (2S,4R)-4-aminopyrrolidine-2-carboxylic acid
  SITE 6: note = (2S,3S)-2-amino-3-(4-chloro-1H-indol-3-yl)butanoic acid
  SITE 7: note = (S)-2-amino-3-(2H-tetrazol-5-yl)propanoic acid
  SITE 8: note = D-N-methyl-Alanine
  SITE 10: note = 4-[4-[(2S)-2-amino-2-carboxy-ethyl]phenyl]benzoic acid
  SITE 11: note = l-Ornithine
  SITE 13: note = D-proline
  SITE 14: note = (2S,4R)-4-(4-(pyrimidin-5-yl)benzyl) pyrrolidine-2-carboxylic acid
XWFGPXXXGXXGPX

SEQ ID NO: 68 - protein, 14 aa, synthetic construct
  SITE 1: note = 4-[4-[(2S)-2-amino-2-carboxy-ethyl]phenyl]benzoic acid
  SITE 3: note = 4-[(2S)-2-amino-2-carboxy-ethyl]benzoic acid
  SITE 5: note = (2S,4R)-4-aminopyrrolidine-2-carboxylic acid
  SITE 6: note = (2S,3S)-2-amino-3-(1-naphthyl)butanoic acid
  SITE 7: note = (S)-2-amino-3-(2H-tetrazol-5-yl)propanoic acid
  SITE 8: note = D-N-methyl-Alanine
  SITE 10: note = 4-[4-[(2S)-2-amino-2-carboxy-ethyl]phenyl]benzoic acid
  SITE 11: note = l-Ornithine
  SITE 13: note = (2R,4S)-4-aminopyrrolidine-2-carboxylic acid
  SITE 14: note = (2S,4R)-4-(4-(pyrimidin-5-yl)benzyl) pyrrolidine-2-carboxylic acid
XWFGPXXXGXXGPX

SEQ ID NO: 69 - protein, 14 aa, synthetic construct
  SITE 1: note (S)-2-(3-((2-(4-(2-amino-2-carboxyethyl)phenoxy)ethyl)amino )-3-oxopropoxy)-N,N,N-trimethylethan-1-aminium
  SITE 3: note = 4-[(2S)-2-amino-2-carboxy-ethyl]benzoic acid
  SITE 5: note = (2S,4R)-4-aminopyrrolidine-2-carboxylic acid
  SITE 6: note = (2S,3S)-2-amino-3-(4-chloro-1H-indol-3-yl)butanoic acid
  SITE 8: note = D-N-methyl-Alanine
  SITE 10: note = 4-[4-[(2S)-2-amino-2-carboxy-ethyl]phenyl]benzoic acid
  SITE 13: note = (2R,4S)-4-aminopyrrolidine-2-carboxylic acid
  SITE 14: note = (2S,4R)-4-(4-(pyrimidin-5-yl)benzyl) pyrrolidine-2-carboxylic acid
XWFGPXDXGXWGPX

SEQ ID NO: 70 - protein, 14 aa, synthetic construct
  SITE 1: note (2S)-3-[4-(2-acetamidoethoxy)phenyl]-2-amino-propanoic acid
  SITE 3: note = 4-[(2S)-2-amino-2-carboxy-ethyl]benzoic acid
  SITE 5: note = (2S,4R)-4-aminopyrrolidine-2-carboxylic acid
  SITE 6: note = (2S,3S)-2-amino-3-(4-chloro-1H-indol-3-yl)butanoic acid
  SITE 8: note = D-N-methyl-Alanine
  SITE 10: note = 4-[4-[(2S)-2-amino-2-carboxy-ethyl]phenyl]benzoic acid
  SITE 13: note 2-(2-(3-(((3S,5R)-5-carboxypyrrolidin-3-yl)amino)-3-oxoprop oxy)ethoxy)-N,N,N-trimethylethan-1-aminium
  SITE 14: note = (2S,4R)-4-(4-(pyrimidin-5-yl)benzyl) pyrrolidine-2-carboxylic acid
XWFGPXDXGXWGXX

SEQ ID NO: 71 - protein, 14 aa, synthetic construct
  SITE 1: note (S)-6-((2-(4-(2-amino-2-carboxyethyl)phenoxy)ethyl)amino)-N ,N,N-trimethyl-6-oxohexan-1-aminium
  SITE 3: note = 4-[(2S)-2-amino-2-carboxy-ethyl]benzoic acid
  SITE 5: note = (2S,4R)-4-aminopyrrolidine-2-carboxylic acid
  SITE 6: note = (2S,3S)-2-amino-3-(1-naphthyl)butanoic acid
  SITE 8: note = D-N-methyl-Alanine
  SITE 10: note = 4-[4-[(2S)-2-amino-2-carboxy-ethyl]phenyl]benzoic acid
  SITE 13: note = (2R,4S)-4-aminopyrrolidine-2-carboxylic acid
  SITE 14: note = (2S,4R)-4-(4-fluorobenzyl)pyrrolidine-2-carboxylic acid
XWFGPXDXGXWGPX

SEQ ID NO: 72 - protein, 14 aa, synthetic construct
  SITE 1: note (2S)-3-[4-(2-acetamidoethoxy)phenyl]-2-amino-propanoic acid
  SITE 3: note = 4-[(2S)-2-amino-2-carboxy-ethyl]benzoic acid
  SITE 5: note = (2S,4R)-4-aminopyrrolidine-2-carboxylic acid
  SITE 6: note = (2S,3S)-2-amino-3-(1-naphthyl)butanoic acid
  SITE 8: note = D-N-methyl-Alanine
  SITE 10: note = 4-[4-[(2S)-2-amino-2-carboxy-ethyl]phenyl]benzoic acid
  SITE 11: note = (2S)-2-amino-3-(3-pyridyl)propanoic acid
  SITE 13: note = (2R,4S)-4-aminopyrrolidine-2-carboxylic acid
  SITE 14: note = (2S,4R)-4-(4-(pyrimidin-5-yl)benzyl) pyrrolidine-2-carboxylic acid
XWFGPXDXGXXGPX

SEQ ID NO: 73 - protein, 14 aa, synthetic construct
  SITE 1: note (2S)-3-[4-(2-acetamidoethoxy)phenyl]-2-amino-propanoic acid
  SITE 3: note = 4-[(2S)-2-amino-2-carboxy-ethyl]benzoic acid
  SITE 5: note = (2S,4R)-4-aminopyrrolidine-2-carboxylic acid
  SITE 6: note = (2S,3S)-2-amino-3-(1-naphthyl)butanoic acid
  SITE 8: note = D-N-methyl-Alanine
  SITE 10: note = 4-[4-[(2S)-2-amino-2-carboxy-ethyl]phenyl]benzoic acid
  SITE 11: note = l-Ornithine
  SITE 13: note = D-proline
  SITE 14: note = (2S,4R)-4-(4-(pyrimidin-5-yl)benzyl) pyrrolidine-2-carboxylic acid
XWFGPXDXGXXGPX

SEQ ID NO: 74 - protein, 14 aa, synthetic construct
  SITE 1: note (2S)-3-[4-(2-acetamidoethoxy)phenyl]-2-amino-propanoic acid
  SITE 3: note = 4-[(2S)-2-amino-2-carboxy-ethyl]benzoic acid
  SITE 5: note = (2S,4R)-4-aminopyrrolidine-2-carboxylic acid
  SITE 6: note = (2S,3S)-2-amino-3-(1-naphthyl)butanoic acid
  SITE 8: note = D-N-methyl-Alanine
  SITE 10: note = 4-[4-[(2S)-2-amino-2-carboxy-ethyl]phenyl]benzoic acid
  SITE 11: note = l-homoserine
  SITE 13: note = (2R,4S)-4-aminopyrrolidine-2-carboxylic acid
  SITE 14: note = (2S,4R)-4-(4-(pyrimidin-5-yl)benzyl) pyrrolidine-2-carboxylic acid
XWFGPXDXGXXGPX

SEQ ID NO: 75 - protein, 14 aa, synthetic construct
  SITE 1: note (2S)-3-[4-(2-acetamidoethoxy)phenyl]-2-amino-propanoic acid
  SITE 3: note = 4-[(2S)-2-amino-2-carboxy-ethyl]benzoic acid
  SITE 5: note = (2S,4R)-4-aminopyrrolidine-2-carboxylic acid
  SITE 6: note = (2S,3S)-2-amino-3-(1-naphthyl)butanoic acid
  SITE 8: note = D-N-methyl-Alanine
  SITE 10: note = 4-[4-[(2S)-2-amino-2-carboxy-ethyl]phenyl]benzoic acid
  SITE 11: note = (2S)-2-amino-3-pyridazin-4-yl-propanoic acid
  SITE 13: note = (2R,4S)-4-aminopyrrolidine-2-carboxylic acid
  SITE 14: note = (2S,4R)-4-(4-(pyrimidin-5-yl)benzyl) pyrrolidine-2-carboxylic acid
XWFGPXDXGXXGPX

SEQ ID NO: 76 - protein, 14 aa, synthetic construct
  SITE 1: note (2S)-3-[4-(2-acetamidoethoxy)phenyl]-2-amino-propanoic acid
  SITE 3: note = 4-[(2S)-2-amino-2-carboxy-ethyl]benzoic acid
  SITE 5: note = (2S,4R)-4-aminopyrrolidine-2-carboxylic acid
  SITE 6: note = (2S,3S)-2-amino-3-(4-chloro-1H-indol-3-yl)butanoic acid
  SITE 8: note = D-N-methyl-Alanine
  SITE 10: note 4-[5-[(2S)-2-amino-2-carboxy-ethyl]pyrimidin-2-yl]benzoic acid
  SITE 13: note = (2R,4S)-4-aminopyrrolidine-2-carboxylic acid
  SITE 14: note = (2S,4R)-4-(4-(pyrimidin-5-yl)benzyl) pyrrolidine-2-carboxylic acid
XWFGPXDXGXWGPX

SEQ ID NO: 77 - protein, 14 aa, synthetic construct
  SITE 1: note (2S)-3-[4-(2-acetamidoethoxy)phenyl]-2-amino-propanoic acid
  SITE 3: note = 4-[(2S)-2-amino-2-carboxy-ethyl]benzoic acid
  SITE 5: note = (2S,4R)-4-aminopyrrolidine-2-carboxylic acid
  SITE 6: note = (2S,3S)-2-amino-3-(1-naphthyl)butanoic acid
  SITE 8: note = D-N-methyl-Alanine
  SITE 10: note = 4-[4-[(2S)-2-amino-2-carboxy-ethyl]phenyl]benzoic acid
  SITE 11: note = (2S)-2-amino-3-(4-pyridyl)propanoic acid
  SITE 13: note = (2R,4S)-4-aminopyrrolidine-2-carboxylic acid
  SITE 14: note = (2S,4R)-4-(4-(pyrimidin-5-yl)benzyl) pyrrolidine-2-carboxylic acid
XWFGPXDXGXXAPX

SEQ ID NO: 78 - protein, 14 aa, synthetic construct
  SITE 1: note (2S)-3-[4-(2-acetamidoethoxy)phenyl]-2-amino-propanoic acid
  SITE 3: note = 4-[(2S)-2-amino-2-carboxy-ethyl]benzoic acid
  SITE 5: note = (2S,4R)-4-aminopyrrolidine-2-carboxylic acid
  SITE 6: note = (2S,3S)-2-amino-3-(1-naphthyl)butanoic acid
  SITE 8: note = D-N-methyl-Alanine
  SITE 10: note = 4-[4-[(2S)-2-amino-2-carboxy-ethyl]phenyl]benzoic acid
  SITE 11: note = (S)-2-amino-5-methoxypentanoic acid
  SITE 13: note = (2R,4S)-4-aminopyrrolidine-2-carboxylic acid
  SITE 14: note = (2S,4R)-4-(4-(pyrimidin-5-yl)benzyl) pyrrolidine-2-carboxylic acid
XWFGPXDXGXXAPX

SEQ ID NO: 79 - protein, 14 aa, synthetic construct
  SITE 1: note (2S)-3-[4-(2-acetamidoethoxy)phenyl]-2-amino-propanoic acid
  SITE 3: note = 4-[(2S)-2-amino-2-carboxy-ethyl]benzoic acid
  SITE 5: note = (2S,4R)-4-aminopyrrolidine-2-carboxylic acid
  SITE 6: note = (2S,3S)-2-amino-3-(1-naphthyl)butanoic acid
  SITE 8: note = D-N-methyl-Alanine
  SITE 10: note = 4-[4-[(2S)-2-amino-2-carboxy-ethyl]phenyl]benzoic acid
  SITE 11: note = (2S)-2-amino-3-(1-bicyclo[1.1.1]pentanyl)propanoic acid
  SITE 13: note = (2R,4S)-4-aminopyrrolidine-2-carboxylic acid
  SITE 14: note = (2S,4R)-4-(4-(pyrimidin-5-yl)benzyl) pyrrolidine-2-carboxylic acid
XWFGPXDXGXXAPX

SEQ ID NO: 80 - protein, 14 aa, synthetic construct
  SITE 1: note (2S)-3-[4-(2-acetamidoethoxy)phenyl]-2-amino-propanoic acid
  SITE 3: note = 4-[(2S)-2-amino-2-carboxy-ethyl]benzoic acid
  SITE 5: note = (2S,4R)-4-aminopyrrolidine-2-carboxylic acid
  SITE 6: note = (2S,3S)-2-amino-3-(1-naphthyl)butanoic acid
  SITE 8: note = D-N-methyl-Alanine
  SITE 10: note = 4-[4-[(2S)-2-amino-2-carboxy-ethyl]phenyl]benzoic acid
  SITE 11: note = (2S)-2-amino-3-(4-pyridyl)propanoic acid
  SITE 13: note = D-proline
  SITE 14: note (2S,4R)-4-(pyrimidin-5-ylmethyl)pyrrolidine-2-carboxylic acid
XWFGPXDXGXXAPX

SEQ ID NO: 81 - protein, 14 aa, synthetic construct
  SITE 1: note (2S)-3-[4-(2-acetamidoethoxy)phenyl]-2-amino-propanoic acid
  SITE 3: note = 4-[(2S)-2-amino-2-carboxy-ethyl]benzoic acid
  SITE 5: note = (2S,4R)-4-aminopyrrolidine-2-carboxylic acid
  SITE 6: note = (2S,3S)-2-amino-3-(1-naphthyl)butanoic acid
  SITE 8: note = D-N-methyl-Alanine
  SITE 10: note 4-[5-[(2S)-2-amino-2-carboxy-ethyl]pyrimidin-2-yl]benzoic acid
  SITE 11: note = (2S)-2-amino-3-(4-pyridyl)propanoic acid
  SITE 13: note = D-proline
  SITE 14: note = (2S,4R)-4-(4-(pyrimidin-5-yl)benzyl) pyrrolidine-2-carboxylic acid
XWFGPXDXGXXAPX

SEQ ID NO: 82 - protein, 14 aa, synthetic construct
  SITE 1: note (2S)-3-[4-(2-acetamidoethoxy)phenyl]-2-amino-propanoic acid
  SITE 3: note = 4-[(2S)-2-amino-2-carboxy-ethyl]benzoic acid
  SITE 5: note = (2S,4R)-4-aminopyrrolidine-2-carboxylic acid
  SITE 6: note = (2S,3S)-2-amino-3-(1-naphthyl)butanoic acid
  SITE 8: note = D-N-methyl-Alanine
  SITE 10: note 4-[5-[(2S)-2-amino-2-carboxy-ethyl]-2-pyridyl]benzoic acid
  SITE 13: note = (2R,4S)-4-aminopyrrolidine-2-carboxylic acid
  SITE 14: note = (2S,4R)-4-(4-(pyrimidin-5-yl)benzyl) pyrrolidine-2-carboxylic acid
XWFGPXDXGXYAPX

SEQ ID NO: 83 - protein, 14 aa, synthetic construct
  SITE 1: note (2S)-3-[4-(2-acetamidoethoxy)phenyl]-2-amino-propanoic acid
  SITE 3: note = 4-[(2S)-2-amino-2-carboxy-ethyl]benzoic acid
  SITE 5: note = (2S,4R)-4-aminopyrrolidine-2-carboxylic acid
  SITE 6: note = (2S,3S)-2-amino-3-(1-naphthyl)butanoic acid
  SITE 8: note = D-N-methyl-Alanine
  SITE 10: note 4-[5-[(2S)-2-amino-2-carboxy-ethyl]-2-pyridyl]benzoic acid
  SITE 13: note = (2R,4S)-4-aminopyrrolidine-2-carboxylic acid
  SITE 14: note = (2S,4R)-4-(4-fluorobenzyl)pyrrolidine-2-carboxylic acid
XWFGPXDXGXYAPX

SEQ ID NO: 84 - protein, 14 aa, synthetic construct
  SITE 1: note (S)-2-(2-(3-((2-(4-(2-amino-2-carboxyethyl)phenoxy)ethyl)am ino)-3-oxopropoxy)ethoxy)-N,N,N-trimethylethan-1-aminium
  SITE 3: note = 4-[(2S)-2-amino-2-carboxy-ethyl]benzoic acid
  SITE 5: note = (2S,4R)-4-aminopyrrolidine-2-carboxylic acid
  SITE 6: note = (2S,3S)-2-amino-3-(1-naphthyl)butanoic acid
  SITE 8: note = D-N-methyl-Alanine
  SITE 10: note 4-[5-[(2S)-2-amino-2-carboxy-ethyl]-2-pyridyl]benzoic acid
  SITE 11: note = (2S)-2-amino-3-(4-pyridyl)propanoic acid
  SITE 13: note = D-proline
  SITE 14: note (2S,4R)-4-(pyrimidin-5-ylmethyl)pyrrolidine-2-carboxylic acid
XWFGPXDXGXXAPX

SEQ ID NO: 85 - protein, 14 aa, synthetic construct
  SITE 1: note (2S)-3-[4-(2-acetamidoethoxy)phenyl]-2-amino-propanoic acid
  SITE 3: note = 4-[(2S)-2-amino-2-carboxy-ethyl]benzoic acid
  SITE 5: note = (2S,4R)-4-aminopyrrolidine-2-carboxylic acid
  SITE 6: note = (2S,3S)-2-amino-3-(1-naphthyl)butanoic acid
  SITE 8: note = D-N-methyl-Alanine
  SITE 10: note 4-[5-[(2S)-2-amino-2-carboxy-ethyl]-2-pyridyl]benzoic acid
  SITE 11: note = l-homoserine
  SITE 13: note = (2R,4S)-4-aminopyrrolidine-2-carboxylic acid
  SITE 14: note = (2S,4R)-4-(4-(pyrimidin-5-yl)benzyl) pyrrolidine-2-carboxylic acid
XWFGPXDXGXXAPX

SEQ ID NO: 86 - protein, 14 aa, synthetic construct
  SITE 1: note (2S)-3-[4-(2-acetamidoethoxy)phenyl]-2-amino-propanoic acid
  SITE 3: note = 4-[(2S)-2-amino-2-carboxy-ethyl]benzoic acid
  SITE 5: note = (2S,4R)-4-aminopyrrolidine-2-carboxylic acid
  SITE 6: note = (2S,3S)-2-amino-3-(1-naphthyl)butanoic acid
  SITE 8: note = D-N-methyl-Alanine
  SITE 10: note 4-[5-[(2S)-2-amino-2-carboxy-ethyl]-2-pyridyl]benzoic acid
  SITE 11: note = (S)-2-amino-5-methoxypentanoic acid
  SITE 13: note = (2R,4S)-4-aminopyrrolidine-2-carboxylic acid
  SITE 14: note = (2S,4R)-4-(4-(pyrimidin-5-yl)benzyl) pyrrolidine-2-carboxylic acid
XWFGPXDXGXXAPX

SEQ ID NO: 87 - protein, 14 aa, synthetic construct
  SITE 1: note (2S)-3-[4-(2-acetamidoethoxy)phenyl]-2-amino-propanoic acid
  SITE 3: note = 4-[(2S)-2-amino-2-carboxy-ethyl]benzoic acid
  SITE 5: note = (2S,4R)-4-aminopyrrolidine-2-carboxylic acid
  SITE 6: note = (2S,3S)-2-amino-3-(1-naphthyl)butanoic acid
  SITE 8: note = D-N-methyl-Alanine
  SITE 10: note 4-[5-[(2S)-2-amino-2-carboxy-ethyl]-2-pyridyl]benzoic acid
  SITE 11: note = (2S)-2-amino-3-(1-bicyclo[1.1.1]pentanyl)propanoic acid
  SITE 13: note = (2R,4S)-4-aminopyrrolidine-2-carboxylic acid
  SITE 14: note = (2S,4R)-4-(4-(pyrimidin-5-yl)benzyl) pyrrolidine-2-carboxylic acid
XWFGPXDXGXXAPX

SEQ ID NO: 88 - protein, 14 aa, synthetic construct
  SITE 1: note (2S)-3-[4-(2-acetamidoethoxy)phenyl]-2-amino-propanoic acid
  SITE 3: note = 4-[(2S)-2-amino-2-carboxy-ethyl]benzoic acid
  SITE 5: note = (2S,4R)-4-aminopyrrolidine-2-carboxylic acid
  SITE 6: note = (2S,3S)-2-amino-3-(1-naphthyl)butanoic acid
  SITE 8: note = D-N-methyl-Alanine
  SITE 10: note 4-[5-[(2S)-2-amino-2-carboxy-ethyl]-2-pyridyl]benzoic acid
  SITE 13: note = (2R,4S)-4-aminopyrrolidine-2-carboxylic acid
  SITE 14: note = (2S,4R)-4-(4-(pyrimidin-5-yl)benzyl) pyrrolidine-2-carboxylic acid
XWFGPXDXGXFAPX

SEQ ID NO: 89 - protein, 14 aa, synthetic construct
  SITE 1: note (2S)-3-[4-(2-acetamidoethoxy)phenyl]-2-amino-propanoic acid
  SITE 3: note = 4-[(2S)-2-amino-2-carboxy-ethyl]benzoic acid
  SITE 5: note = (2S,4R)-4-aminopyrrolidine-2-carboxylic acid
  SITE 6: note = (2S,3S)-2-amino-3-(1-naphthyl)butanoic acid
  SITE 8: note = D-N-methyl-Alanine
  SITE 10: note 4-[5-[(2S)-2-amino-2-carboxy-ethyl]-2-pyridyl]benzoic acid
  SITE 11: note = (2S)-2-amino-3-pyridazin-4-yl-propanoic acid
  SITE 13: note = (2R,4S)-4-aminopyrrolidine-2-carboxylic acid
  SITE 14: note = (2S,4R)-4-(4-(pyrimidin-5-yl)benzyl) pyrrolidine-2-carboxylic acid
XWFGPXDXGXXAPX

SEQ ID NO: 90 - protein, 14 aa, synthetic construct
  SITE 1: note (S)-6-((2-(4-(2-amino-2-carboxyethyl)phenoxy)ethyl)amino)-N ,N,N-trimethyl-6-oxohexan-1-aminium
  SITE 3: note = 4-[(2S)-2-amino-2-carboxy-ethyl]benzoic acid
  SITE 5: note = (2S,4R)-4-aminopyrrolidine-2-carboxylic acid
  SITE 6: note = (2S,3S)-2-amino-3-(1-naphthyl)butanoic acid
  SITE 8: note = D-N-methyl-Alanine
  SITE 10: note = 4-[4-[(2S)-2-amino-2-carboxy-ethyl]phenyl]benzoic acid
  SITE 13: note = (2R,4S)-4-aminopyrrolidine-2-carboxylic acid
  SITE 14: note = (2S,4R)-4-(4-(pyrimidin-5-yl)benzyl) pyrrolidine-2-carboxylic acid
XWFGPXDXGXYAPX

SEQ ID NO: 91 - protein, 14 aa, synthetic construct
  SITE 1: note (2S)-3-[4-(2-acetamidoethoxy)phenyl]-2-amino-propanoic acid
  SITE 3: note = 4-[(2S)-2-amino-2-carboxy-ethyl]benzoic acid
  SITE 5: note = (2S,4R)-4-aminopyrrolidine-2-carboxylic acid
  SITE 6: note = (2S,3S)-2-amino-3-(1-naphthyl)butanoic acid
  SITE 8: note = D-N-methyl-Alanine
  SITE 10: note = 4-[4-[(2S)-2-amino-2-carboxy-ethyl]phenyl]benzoic acid
  SITE 11: note = (S)-2-amino-5-(methylamino)pentanoic acid
  SITE 13: note = D-proline
  SITE 14: note = (2S,4R)-4-(4-(pyrimidin-5-yl)benzyl) pyrrolidine-2-carboxylic acid
XWFGPXDXGXXAPX

SEQ ID NO: 92 - protein, 14 aa, synthetic construct
  SITE 1: note (2S)-3-[4-(2-acetamidoethoxy)phenyl]-2-amino-propanoic acid
  SITE 3: note = 4-[(2S)-2-amino-2-carboxy-ethyl]benzoic acid
  SITE 5: note = (2S,4R)-4-aminopyrrolidine-2-carboxylic acid
  SITE 6: note = (2S,3S)-2-amino-3-(1-naphthyl)butanoic acid
  SITE 8: note = D-N-methyl-Alanine
  SITE 10: note = 4-[4-[(2S)-2-amino-2-carboxy-ethyl]phenyl]benzoic acid
  SITE 11: note = (S)-2-amino-5-methoxypentanoic acid
  SITE 12: note = (S)-2-Aminopentanoic acid
  SITE 13: note = (2R,4S)-4-aminopyrrolidine-2-carboxylic acid
  SITE 14: note = (2S,4R)-4-(4-(pyrimidin-5-yl)benzyl) pyrrolidine-2-carboxylic acid
XWFGPXDXGXXXPX

SEQ ID NO: 93 - protein, 14 aa, synthetic construct
  SITE 1: note (2S)-3-[4-(2-acetamidoethoxy)phenyl]-2-amino-propanoic acid
  SITE 3: note = 4-[(2S)-2-amino-2-carboxy-ethyl]benzoic acid
  SITE 5: note = (2S,4R)-4-aminopyrrolidine-2-carboxylic acid
  SITE 6: note = (2S,3S)-2-amino-3-(1-naphthyl)butanoic acid
  SITE 8: note = D-N-methyl-Alanine
  SITE 10: note 4-[5-[(2S)-2-amino-2-carboxy-ethyl]-2-pyridyl]benzoic acid
  SITE 11: note = (2S)-2-amino-3-(4-pyridyl)propanoic acid
  SITE 13: note = (2R,4S)-4-aminopyrrolidine-2-carboxylic acid
  SITE 14: note = (2S,4R)-4-(4-(pyrimidin-5-yl)benzyl) pyrrolidine-2-carboxylic acid
XWFGPXDXGXXAPX

SEQ ID NO: 94 - protein, 14 aa, synthetic construct
  SITE 1: note (2S)-3-[4-(2-acetamidoethoxy)phenyl]-2-amino-propanoic acid
  SITE 3: note = 4-[(2S)-2-amino-2-carboxy-ethyl]benzoic acid
  SITE 5: note = (2S,4R)-4-aminopyrrolidine-2-carboxylic acid
  SITE 6: note = (2S,3S)-2-amino-3-(1-naphthyl)butanoic acid
  SITE 7: note = (S)-2-amino-3-(2H-tetrazol-5-yl)propanoic acid
  SITE 8: note = D-N-methyl-Alanine
  SITE 10: note = 4-[4-[(2S)-2-amino-2-carboxy-ethyl]phenyl]benzoic acid
  SITE 11: note = l-homoserine
  SITE 13: note = (2R,4S)-4-aminopyrrolidine-2-carboxylic acid
  SITE 14: note = (2S,4R)-4-(4-(pyrimidin-5-yl)benzyl) pyrrolidine-2-carboxylic acid
XWFGPXXXGXXAPX

SEQ ID NO: 95 - protein, 14 aa, synthetic construct
  SITE 1: note (2S)-3-[4-(2-acetamidoethoxy)phenyl]-2-amino-propanoic acid
  SITE 3: note = 4-[(2S)-2-amino-2-carboxy-ethyl]benzoic acid
  SITE 5: note = (2S,4R)-4-aminopyrrolidine-2-carboxylic acid
  SITE 6: note = (2S,3S)-2-amino-3-(1-naphthyl)butanoic acid
  SITE 8: note = D-N-methyl-Alanine
  SITE 10: note = 4-[4-[(2S)-2-amino-2-carboxy-ethyl]phenyl]benzoic acid
  SITE 11: note = (2S)-2-amino-3-pyridazin-4-yl-propanoic acid
  SITE 13: note = (2R,4S)-4-aminopyrrolidine-2-carboxylic acid
  SITE 14: note = (2S,4R)-4-(4-(pyrimidin-5-yl)benzyl) pyrrolidine-2-carboxylic acid
XWFGPXDXGXXAPX

SEQ ID NO: 96 - protein, 14 aa, synthetic construct
  SITE 1: note (2S)-3-[4-(2-acetamidoethoxy)phenyl]-2-amino-propanoic acid
  SITE 3: note = 4-[(2S)-2-amino-2-carboxy-ethyl]benzoic acid
  SITE 5: note = (2S,4R)-4-aminopyrrolidine-2-carboxylic acid
  SITE 6: note = (2S,3S)-2-amino-3-(1-naphthyl)butanoic acid
  SITE 8: note = D-N-methyl-Alanine
  SITE 10: note 4-[5-[(2S)-2-amino-2-carboxy-ethyl]pyrimidin-2-yl]benzoic acid
  SITE 11: note = (2S)-2-amino-3-(4-pyridyl)propanoic acid
  SITE 13: note = (2R,4S)-4-aminopyrrolidine-2-carboxylic acid
  SITE 14: note = (2S,4R)-4-(4-(pyrimidin-5-yl)benzyl) pyrrolidine-2-carboxylic acid
XWFGPXDXGXXAPX

SEQ ID NO: 97 - protein, 14 aa, synthetic construct
  SITE 1: note (2S)-3-[4-(2-acetamidoethoxy)phenyl]-2-amino-propanoic acid
  SITE 3: note = 4-[(2S)-2-amino-2-carboxy-ethyl]benzoic acid
  SITE 5: note = (2S,4R)-4-aminopyrrolidine-2-carboxylic acid
  SITE 6: note = (2S,3S)-2-amino-3-(1-naphthyl)butanoic acid
  SITE 8: note = D-N-methyl-Alanine
  SITE 10: note 4-[5-[(2S)-2-amino-2-carboxy-ethyl]pyrimidin-2-yl]benzoic acid
  SITE 11: note = (S)-2-amino-5-methoxypentanoic acid
  SITE 13: note = (2R,4S)-4-aminopyrrolidine-2-carboxylic acid
  SITE 14: note = (2S,4R)-4-(4-(pyrimidin-5-yl)benzyl) pyrrolidine-2-carboxylic acid
XWFGPXDXGXXAPX

SEQ ID NO: 98 - protein, 14 aa, synthetic construct
  SITE 1: note (2S)-3-[4-(2-acetamidoethoxy)phenyl]-2-amino-propanoic acid
  SITE 3: note = 4-[(2S)-2-amino-2-carboxy-ethyl]benzoic acid
  SITE 5: note = (2S,4R)-4-aminopyrrolidine-2-carboxylic acid
  SITE 6: note = (2S,3S)-2-amino-3-(1-naphthyl)butanoic acid
  SITE 8: note = D-N-methyl-Alanine
  SITE 10: note 4-[5-[(2S)-2-amino-2-carboxy-ethyl]pyrimidin-2-yl]benzoic acid
  SITE 13: note = (2R,4S)-4-aminopyrrolidine-2-carboxylic acid
  SITE 14: note = (2S,4R)-4-(4-(pyrimidin-5-yl)benzyl) pyrrolidine-2-carboxylic acid
XWFGPXDXGXFAPX

SEQ ID NO: 99 - protein, 14 aa, synthetic construct
  SITE 1: note (S)-2-(4-(2-amino-2-carboxyethyl)phenoxy)-N,N,N-trimethylet han-1-aminium
  SITE 3: note = 4-[(2S)-2-amino-2-carboxy-ethyl]benzoic acid
  SITE 5: note = (2S,4R)-4-aminopyrrolidine-2-carboxylic acid
  SITE 6: note = (2S,3S)-2-amino-3-(1-naphthyl)butanoic acid
  SITE 8: note = D-N-methyl-Alanine
  SITE 10: note = 4-[4-[(2S)-2-amino-2-carboxy-ethyl]phenyl]benzoic acid
  SITE 13: note = (2R,4S)-4-aminopyrrolidine-2-carboxylic acid
  SITE 14: note = (2S,4R)-4-(4-(pyrimidin-5-yl)benzyl) pyrrolidine-2-carboxylic acid
XWFGPXDXGXWAPX

SEQ ID NO: 100 - protein, 14 aa, synthetic construct
  SITE 1: note (S)-2-(3-((2-(4-(2-amino-2-carboxyethyl)phenoxy)ethyl)amino )-3-oxopropoxy)-N,N,N-trimethylethan-1-aminium
  SITE 3: note = 4-[(2S)-2-amino-2-carboxy-ethyl]benzoic acid
  SITE 5: note = (2S,4R)-4-aminopyrrolidine-2-carboxylic acid
  SITE 6: note = (2S,3S)-2-amino-3-(1-naphthyl)butanoic acid
  SITE 8: note = D-N-methyl-Alanine
  SITE 10: note = 4-[4-[(2S)-2-amino-2-carboxy-ethyl]phenyl]benzoic acid
  SITE 13: note = (2R,4S)-4-aminopyrrolidine-2-carboxylic acid
  SITE 14: note = (2S,4R)-4-(4-(pyrimidin-5-yl)benzyl) pyrrolidine-2-carboxylic acid
XWFGPXDXGXWAPX

SEQ ID NO: 101 - protein, 14 aa, synthetic construct
  SITE 1: note (2S)-3-[4-(2-acetamidoethoxy)phenyl]-2-amino-propanoic acid
  SITE 3: note = 4-[(2S)-2-amino-2-carboxy-ethyl]benzoic acid
  SITE 5: note = (2S,4R)-4-aminopyrrolidine-2-carboxylic acid
  SITE 6: note = (2S,3S)-2-amino-3-(1-naphthyl)butanoic acid
  SITE 8: note = (R)-piperidine-2-carboxylic acid
  SITE 10: note = 4-[4-[(2S)-2-amino-2-carboxy-ethyl]phenyl]benzoic acid
  SITE 11: note = (S)-2-amino-5-methoxypentanoic acid
  SITE 13: note = (2R,4S)-4-aminopyrrolidine-2-carboxylic acid
  SITE 14: note = (2S,4R)-4-(4-(pyrimidin-5-yl)benzyl) pyrrolidine-2-carboxylic acid
XWFGPXDXGXXAPX

SEQ ID NO: 102 - protein, 14 aa, synthetic construct
  SITE 1: note (2S)-3-[4-(2-acetamidoethoxy)phenyl]-2-amino-propanoic acid
  SITE 3: note = 4-[(2S)-2-amino-2-carboxy-ethyl]benzoic acid
  SITE 5: note = (2S,4R)-4-aminopyrrolidine-2-carboxylic acid
  SITE 6: note = (2S,3S)-2-amino-3-(1-naphthyl)butanoic acid
  SITE 8: note = D-N-methyl-Alanine
  SITE 10: note = 4-[4-[(2S)-2-amino-2-carboxy-ethyl]phenyl]benzoic acid
  SITE 11: note = (S)-2-amino-5-methoxypentanoic acid
  SITE 13: note = (2R,4S)-4-hydroxypyrrolidine-2-carboxylic acid
  SITE 14: note = (2S,4R)-4-(4-(pyrimidin-5-yl)benzyl) pyrrolidine-2-carboxylic acid
XWFGPXDXGXXAXX

SEQ ID NO: 103 - protein, 14 aa, synthetic construct
  SITE 1: note (S)-2-(4-(2-amino-2-carboxyethyl)phenoxy)-N,N,N-trimethylet han-1-aminium
  SITE 2: note = (S)-2-Amino-3-(6-fluoro-1H-indol-3-yl)propanoic acid
  SITE 3: note = 4-[(2S)-2-amino-2-carboxy-ethyl]benzoic acid
  SITE 5: note = (2S,4R)-4-aminopyrrolidine-2-carboxylic acid
  SITE 6: note = (2S,3S)-2-amino-3-(4-chloro-1H-indol-3-yl)butanoic acid
  SITE 8: note = D-N-methyl-Alanine
  SITE 10: note = 4-[4-[(2S)-2-amino-2-carboxy-ethyl]phenyl]benzoic acid
  SITE 11: note = (2S)-2-amino-3-(4-pyridyl)propanoic acid
  SITE 13: note = (2R,4S)-4-aminopyrrolidine-2-carboxylic acid
  SITE 14: note = (2S,4R)-4-(4-(pyrimidin-5-yl)benzyl) pyrrolidine-2-carboxylic acid
XXFGPXDXGXXAPX

SEQ ID NO: 104 - protein, 14 aa, synthetic construct
  SITE 1: note (S)-3-(4-(4-Acetylpiperazin-1-yl)phenyl)-2-aminopropanoic acid
  SITE 3: note = 4-[(2S)-2-amino-2-carboxy-ethyl]benzoic acid
  SITE 5: note = (2S,4R)-4-aminopyrrolidine-2-carboxylic acid
  SITE 6: note = (2S,3S)-2-amino-3-(4-chloro-1H-indol-3-yl)butanoic acid
  SITE 8: note = D-N-methyl-Alanine
  SITE 10: note = 4-[4-[(2S)-2-amino-2-carboxy-ethyl]phenyl]benzoic acid
  SITE 11: note = (S)-2-amino-5-methoxypentanoic acid
  SITE 13: note = (2R,4S)-4-aminopyrrolidine-2-carboxylic acid
  SITE 14: note = (2S,4R)-4-(4-(pyrimidin-5-yl)benzyl) pyrrolidine-2-carboxylic acid
XWFGPXDXGXXAPX

SEQ ID NO: 105 - protein, 14 aa, synthetic construct
  SITE 1: note (S)-3-(6-(4-Acetylpiperazin-1-yl)pyridin-3-yl)-2-aminopropa noic acid
  SITE 3: note = 4-[(2S)-2-amino-2-carboxy-ethyl]benzoic acid
  SITE 5: note = (2S,4R)-4-aminopyrrolidine-2-carboxylic acid
  SITE 6: note = (2S,3S)-2-amino-3-(4-chloro-1H-indol-3-yl)butanoic acid
  SITE 8: note = D-N-methyl-Alanine
  SITE 10: note = 4-[4-[(2S)-2-amino-2-carboxy-ethyl]phenyl]benzoic acid
  SITE 11: note = (2S)-2-amino-3-(1-bicyclo[1.1.1]pentanyl)propanoic acid
  SITE 13: note = (2R,4S)-4-aminopyrrolidine-2-carboxylic acid
  SITE 14: note = (2S,4R)-4-(4-(pyrimidin-5-yl)benzyl) pyrrolidine-2-carboxylic acid
XWFGPXDXGXXAPX

SEQ ID NO: 106 - protein, 14 aa, synthetic construct
  SITE 1: note (2S)-3-[4-(2-acetamidoethoxy)phenyl]-2-amino-propanoic acid
  SITE 3: note = 4-[(2S)-2-amino-2-carboxy-ethyl]benzoic acid
  SITE 5: note = (2S,4R)-4-aminopyrrolidine-2-carboxylic acid
  SITE 6: note = (2S,3S)-2-amino-3-(4-chloro-1H-indol-3-yl)butanoic acid
  SITE 8: note = D-N-methyl-Alanine
  SITE 10: note = 4-[4-[(2S)-2-amino-2-carboxy-ethyl]phenyl]benzoic acid
  SITE 11: note = (2S)-2-amino-3-(1-bicyclo[1.1.1]pentanyl)propanoic acid
  SITE 13: note = (2R,4S)-4-aminopyrrolidine-2-carboxylic acid
  SITE 14: note = (2S,4R)-4-(4-(pyrimidin-5-yl)benzyl) pyrrolidine-2-carboxylic acid
XWFGPXDXGXXAPX

SEQ ID NO: 107 - protein, 14 aa, synthetic construct
  SITE 1: note (S)-2-(3-((2-(4-(2-amino-2-carboxyethyl)phenoxy)ethyl)amino )-3-oxopropoxy)-N,N,N-trimethylethan-1-aminium
  SITE 3: note = 4-[(2S)-2-amino-2-carboxy-ethyl]benzoic acid
  SITE 5: note = (2S,4R)-4-aminopyrrolidine-2-carboxylic acid
  SITE 6: note = (2S,3S)-2-amino-3-(4-chloro-1H-indol-3-yl)butanoic acid
  SITE 8: note = D-N-methyl-Alanine
  SITE 10: note = 4-[4-[(2S)-2-amino-2-carboxy-ethyl]phenyl]benzoic acid
  SITE 13: note = (2R,4S)-4-aminopyrrolidine-2-carboxylic acid
  SITE 14: note = (2S,4R)-4-(4-(pyrimidin-5-yl)benzyl) pyrrolidine-2-carboxylic acid
XWFGPXDXGXFAPX

SEQ ID NO: 108 - protein, 14 aa, synthetic construct
  SITE 1: note (S)-2-(3-((2-(4-(2-amino-2-carboxyethyl)phenoxy)ethyl)amino )-3-oxopropoxy)-N,N,N-trimethylethan-1-aminium
  SITE 2: note = (S)-2-Amino-3-(6-fluoro-1H-indol-3-yl)propanoic acid
  SITE 3: note = 4-[(2S)-2-amino-2-carboxy-ethyl]benzoic acid
  SITE 5: note = (2S,4R)-4-aminopyrrolidine-2-carboxylic acid
  SITE 6: note = (2S,3S)-2-amino-3-(4-chloro-1H-indol-3-yl)butanoic acid
  SITE 8: note = D-N-methyl-Alanine
  SITE 10: note = 4-[4-[(2S)-2-amino-2-carboxy-ethyl]phenyl]benzoic acid
  SITE 13: note = (2R,4S)-4-aminopyrrolidine-2-carboxylic acid
  SITE 14: note = (2S,4R)-4-(4-(pyrimidin-5-yl)benzyl) pyrrolidine-2-carboxylic acid
XXFGPXDXGXFAPX

SEQ ID NO: 109 - protein, 14 aa, synthetic construct
  SITE 1: note (S)-2-(3-((2-(4-(2-amino-2-carboxyethyl)phenoxy)ethyl)amino )-3-oxopropoxy)-N,N,N-trimethylethan-1-aminium
  SITE 2: note = (S)-2-Amino-3-(6-fluoro-1H-indol-3-yl)propanoic acid
  SITE 3: note = 4-[(2S)-2-amino-2-carboxy-ethyl]benzoic acid
  SITE 5: note = (2S,4R)-4-aminopyrrolidine-2-carboxylic acid
  SITE 6: note = (2S,3S)-2-amino-3-(4-chloro-1H-indol-3-yl)butanoic acid
  SITE 8: note = D-N-methyl-Alanine
  SITE 10: note = 4-[4-[(2S)-2-amino-2-carboxy-ethyl]phenyl]benzoic acid
  SITE 13: note = (2R,4S)-4-aminopyrrolidine-2-carboxylic acid
  SITE 14: note = (2S,4R)-4-(4-(pyrimidin-5-yl)benzyl) pyrrolidine-2-carboxylic acid
XXFGPXDXGXYAPX

SEQ ID NO: 110 - protein, 14 aa, synthetic construct
  SITE 1: note (2S)-3-[4-(2-acetamidoethoxy)phenyl]-2-amino-propanoic acid
  SITE 2: note = (S)-2-Amino-3-(2-methyl-1H-indol-3-yl)propanoic acid
  SITE 3: note = 4-[(2S)-2-amino-2-carboxy-ethyl]benzoic acid
  SITE 5: note = (2S,4R)-4-aminopyrrolidine-2-carboxylic acid
  SITE 6: note = (2S,3S)-2-amino-3-(1-naphthyl)butanoic acid
  SITE 8: note = D-N-methyl-Alanine
  SITE 10: note = 4-[4-[(2S)-2-amino-2-carboxy-ethyl]phenyl]benzoic acid
  SITE 11: note = (S)-2-amino-5-methoxypentanoic acid
  SITE 13: note = (2R,4S)-4-aminopyrrolidine-2-carboxylic acid
  SITE 14: note = (2S,4R)-4-(4-(pyrimidin-5-yl)benzyl) pyrrolidine-2-carboxylic acid
XXFGPXDXGXXAPX

SEQ ID NO: 111 - protein, 14 aa, synthetic construct
  SITE 1: note = 4-[4-[(2S)-2-amino-2-carboxy-ethyl]phenyl]benzoic acid
  SITE 2: note = (S)-2-Amino-3-(2-methyl-1H-indol-3-yl)propanoic acid
  SITE 3: note = 4-[(2S)-2-amino-2-carboxy-ethyl]benzoic acid
  SITE 5: note = (2S,4R)-4-aminopyrrolidine-2-carboxylic acid
  SITE 6: note = (2S,3S)-2-amino-3-(1-naphthyl)butanoic acid
  SITE 8: note = D-N-methyl-Alanine
  SITE 10: note = 4-[4-[(2S)-2-amino-2-carboxy-ethyl]phenyl]benzoic acid
  SITE 11: note = (S)-2-amino-5-methoxypentanoic acid
  SITE 13: note = (2R,4S)-4-aminopyrrolidine-2-carboxylic acid
  SITE 14: note = (2S,4R)-4-(4-(pyrimidin-5-yl)benzyl) pyrrolidine-2-carboxylic acid
XXFGPXDXGXXAPX

SEQ ID NO: 112 - protein, 14 aa, synthetic construct
  SITE 1: note = 4-[4-[(2S)-2-amino-2-carboxy-ethyl]phenyl]benzoic acid
  SITE 3: note (S)-2-Amino-3-(4-(5-oxo-4,5-dihydro-1,2,4-oxadiazol-3-yl)ph enyl)propanoic acid
  SITE 5: note = (2S,4R)-4-aminopyrrolidine-2-carboxylic acid
  SITE 6: note = (2S,3S)-2-amino-3-(1-naphthyl)butanoic acid
  SITE 8: note = D-N-methyl-Alanine
  SITE 10: note = 4-[4-[(2S)-2-amino-2-carboxy-ethyl]phenyl]benzoic acid
  SITE 11: note = (S)-2-amino-5-methoxypentanoic acid
  SITE 13: note = (2R,4S)-4-aminopyrrolidine-2-carboxylic acid
  SITE 14: note = (2S,4R)-4-(4-(pyrimidin-5-yl)benzyl) pyrrolidine-2-carboxylic acid
XWXGPXDXGXXAPX

SEQ ID NO: 113 - protein, 14 aa, synthetic construct
  SITE 1: note = 4-[4-[(2S)-2-amino-2-carboxy-ethyl]phenyl]benzoic acid
  SITE 3: note = 4-[(2S)-2-amino-2-carboxy-ethyl]benzoic acid
  SITE 5: note = (2S,4R)-4-aminopyrrolidine-2-carboxylic acid
  SITE 6: note = (2S,3S)-2-amino-3-(1-naphthyl)butanoic acid
  SITE 7: note = N4,N4-dimethyl-L-asparagine
  SITE 8: note = D-N-methyl-Alanine
  SITE 10: note = 4-[4-[(2S)-2-amino-2-carboxy-ethyl]phenyl]benzoic acid
  SITE 11: note = (S)-2-amino-5-methoxypentanoic acid
  SITE 13: note = (2R,4S)-4-aminopyrrolidine-2-carboxylic acid
  SITE 14: note = (2S,4R)-4-(4-(pyrimidin-5-yl)benzyl) pyrrolidine-2-carboxylic acid
XWFGPXXXGXXAPX

SEQ ID NO: 114 - protein, 14 aa, synthetic construct
  SITE 1: note = 4-[4-[(2S)-2-amino-2-carboxy-ethyl]phenyl]benzoic acid
  SITE 3: note = 4-[(2S)-2-amino-2-carboxy-ethyl]benzoic acid
  SITE 5: note = (2S,4R)-4-aminopyrrolidine-2-carboxylic acid
  SITE 6: note = (2S,3S)-2-amino-3-(1-naphthyl)butanoic acid
  SITE 7: note = (2S)-2-amino-5-ureido-pentanoic acid
  SITE 8: note = D-N-methyl-Alanine
  SITE 10: note = 4-[4-[(2S)-2-amino-2-carboxy-ethyl]phenyl]benzoic acid
  SITE 11: note = (S)-2-amino-5-methoxypentanoic acid
  SITE 13: note = (2R,4S)-4-aminopyrrolidine-2-carboxylic acid
  SITE 14: note = (2S,4R)-4-(4-(pyrimidin-5-yl)benzyl) pyrrolidine-2-carboxylic acid
XWFGPXXXGXXAPX

SEQ ID NO: 115 - protein, 14 aa, synthetic construct
  SITE 1: note (2S)-3-[4-(2-acetamidoethoxy)phenyl]-2-amino-propanoic acid
  SITE 3: note = 4-[(2S)-2-amino-2-carboxy-ethyl]benzoic acid
  SITE 5: note = (2S,4R)-4-aminopyrrolidine-2-carboxylic acid
  SITE 6: note = (2S,3S)-2-amino-3-(1-naphthyl)butanoic acid
  SITE 8: note = D-proline
  SITE 10: note = 4-[4-[(2S)-2-amino-2-carboxy-ethyl]phenyl]benzoic acid
  SITE 11: note = (S)-2-amino-5-methoxypentanoic acid
  SITE 13: note = (2R,4S)-4-aminopyrrolidine-2-carboxylic acid
  SITE 14: note = (2S,4R)-4-(4-(pyrimidin-5-yl)benzyl) pyrrolidine-2-carboxylic acid
XWFGPXDPGXXAPX

SEQ ID NO: 116 - protein, 14 aa, synthetic construct
  SITE 1: note (2S)-3-[4-(2-acetamidoethoxy)phenyl]-2-amino-propanoic acid
  SITE 3: note = 4-[(2S)-2-amino-2-carboxy-ethyl]benzoic acid
  SITE 5: note = (2S,4R)-4-aminopyrrolidine-2-carboxylic acid
  SITE 6: note = (2S,3S)-2-amino-3-(1-naphthyl)butanoic acid
  SITE 8: note = D-N-methyl-Alanine
  SITE 10: note = 4-[4-[(2S)-2-amino-2-carboxy-ethyl]phenyl]benzoic acid
  SITE 11: note = (S)-2-Amino-3-(carboxyamino)propanoic acid
  SITE 13: note = (2R,4S)-4-aminopyrrolidine-2-carboxylic acid
  SITE 14: note = (2S,4R)-4-(4-(pyrimidin-5-yl)benzyl) pyrrolidine-2-carboxylic acid
XWFGPXDXGXXAPX

SEQ ID NO: 117 - protein, 14 aa, synthetic construct
  SITE 1: note = 4-[4-[(2S)-2-amino-2-carboxy-ethyl]phenyl]benzoic acid
  SITE 3: note = 4-[(2S)-2-amino-2-carboxy-ethyl]benzoic acid
  SITE 5: note = (2S,4R)-4-aminopyrrolidine-2-carboxylic acid
  SITE 6: note = (2S,3S)-2-amino-3-(1-naphthyl)butanoic acid
  SITE 8: note = D-N-methyl-Alanine
  SITE 10: note = 4-[4-[(2S)-2-amino-2-carboxy-ethyl]phenyl]benzoic acid
  SITE 11: note = (S)-2-Aminopentanoic acid
  SITE 13: note = (2R,4S)-4-aminopyrrolidine-2-carboxylic acid
  SITE 14: note = (2S,4R)-4-(4-(pyrimidin-5-yl)benzyl) pyrrolidine-2-carboxylic acid
XWFGPXDXGXXAPX

SEQ ID NO: 118 - protein, 14 aa, synthetic construct
  SITE 1: note = 4-[4-[(2S)-2-amino-2-carboxy-ethyl]phenyl]benzoic acid
  SITE 3: note = 4-[(2S)-2-amino-2-carboxy-ethyl]benzoic acid
  SITE 5: note = (2S,4R)-4-aminopyrrolidine-2-carboxylic acid
  SITE 6: note = (2S,3S)-2-amino-3-(1-naphthyl)butanoic acid
  SITE 8: note = D-N-methyl-Alanine
  SITE 10: note = 4-[4-[(2S)-2-amino-2-carboxy-ethyl]phenyl]benzoic acid
  SITE 11: note = O-Methyl-L-serine
  SITE 13: note = (2R,4S)-4-aminopyrrolidine-2-carboxylic acid
  SITE 14: note = (2S,4R)-4-(4-(pyrimidin-5-yl)benzyl) pyrrolidine-2-carboxylic acid
XWFGPXDXGXSAPX

SEQ ID NO: 119 - protein, 14 aa, synthetic construct
  SITE 1: note (2S)-3-[4-(2-acetamidoethoxy)phenyl]-2-amino-propanoic acid
  SITE 3: note = 4-[(2S)-2-amino-2-carboxy-ethyl]benzoic acid
  SITE 5: note = (2S,4R)-4-aminopyrrolidine-2-carboxylic acid
  SITE 6: note = (2S,3S)-2-amino-3-(1-naphthyl)butanoic acid
  SITE 8: note = D-N-methyl-Alanine
  SITE 10: note = 4-[4-[(2S)-2-amino-2-carboxy-ethyl]phenyl]benzoic acid
  SITE 13: note = (2R,4S)-4-aminopyrrolidine-2-carboxylic acid
  SITE 14: note = (2S,4R)-4-(4-(pyrimidin-5-yl)benzyl) pyrrolidine-2-carboxylic acid
XWFGPXDXGXPAPX

SEQ ID NO: 120 - protein, 14 aa, synthetic construct
  SITE 1: note (2S)-3-[4-(2-acetamidoethoxy)phenyl]-2-amino-propanoic acid
  SITE 3: note = 4-[(2S)-2-amino-2-carboxy-ethyl]benzoic acid
  SITE 5: note = (2S,4R)-4-aminopyrrolidine-2-carboxylic acid
  SITE 6: note = (2S,3S)-2-amino-3-(1-naphthyl)butanoic acid
  SITE 8: note = D-N-methyl-Alanine
  SITE 10: note = 4-[4-[(2S)-2-amino-2-carboxy-ethyl]phenyl]benzoic acid
  SITE 11: note = (2S,4R)-4-Hydroxypyrrolidine-2-carboxylic acid
  SITE 13: note = (2R,4S)-4-aminopyrrolidine-2-carboxylic acid
  SITE 14: note = (2S,4R)-4-(4-(pyrimidin-5-yl)benzyl) pyrrolidine-2-carboxylic acid
XWFGPXDXGXXAPX

SEQ ID NO: 121 - protein, 14 aa, synthetic construct
  SITE 1: note (2S)-3-[4-(2-acetamidoethoxy)phenyl]-2-amino-propanoic acid
  SITE 3: note = 4-[(2S)-2-amino-2-carboxy-ethyl]benzoic acid
  SITE 5: note = (2S,4R)-4-aminopyrrolidine-2-carboxylic acid
  SITE 6: note = (2S,3S)-2-amino-3-(1-naphthyl)butanoic acid
  SITE 8: note = D-N-methyl-Alanine
  SITE 10: note = 4-[4-[(2S)-2-amino-2-carboxy-ethyl]phenyl]benzoic acid
  SITE 11: note = (S)-2-Aminooctanedioic acid
  SITE 13: note = (2R,4S)-4-aminopyrrolidine-2-carboxylic acid
  SITE 14: note = (2S,4R)-4-(4-(pyrimidin-5-yl)benzyl) pyrrolidine-2-carboxylic acid
XWFGPXDXGXXAPX

SEQ ID NO: 122 - protein, 14 aa, synthetic construct
  SITE 1: note (2S)-3-[4-(2-acetamidoethoxy)phenyl]-2-amino-propanoic acid
  SITE 3: note = 4-[(2S)-2-amino-2-carboxy-ethyl]benzoic acid
  SITE 5: note = (2S,4R)-4-aminopyrrolidine-2-carboxylic acid
  SITE 6: note = (2S,3S)-2-amino-3-(1-naphthyl)butanoic acid
  SITE 8: note = D-N-methyl-Alanine
  SITE 10: note = 4-[4-[(2S)-2-amino-2-carboxy-ethyl]phenyl]benzoic acid
  SITE 11: note = (2S)-2-amino-5-ureido-pentanoic acid
  SITE 13: note = (2R,4S)-4-aminopyrrolidine-2-carboxylic acid
  SITE 14: note = (2S,4R)-4-(4-(pyrimidin-5-yl)benzyl) pyrrolidine-2-carboxylic acid
XWFGPXDXGXXAPX

SEQ ID NO: 123 - protein, 14 aa, synthetic construct
  SITE 1: note (2S)-3-[4-(2-acetamidoethoxy)phenyl]-2-amino-propanoic acid
  SITE 3: note = 4-[(2S)-2-amino-2-carboxy-ethyl]benzoic acid
  SITE 5: note = (2S,4R)-4-aminopyrrolidine-2-carboxylic acid
  SITE 6: note = (2S,3S)-2-amino-3-(1-naphthyl)butanoic acid
  SITE 8: note = D-N-methyl-Alanine
  SITE 10: note = 4-[4-[(2S)-2-amino-2-carboxy-ethyl]phenyl]benzoic acid
  SITE 11: note = (S)-2-amino-5-methoxypentanoic acid
  SITE 13: note = (2R,4S)-4-Fluoropyrrolidine-2-carboxylic acid
  SITE 14: note = (2S,4R)-4-(4-(pyrimidin-5-yl)benzyl) pyrrolidine-2-carboxylic acid
XWFGPXDXGXXAXX

SEQ ID NO: 124 - protein, 14 aa, synthetic construct
  SITE 1: note (2S)-3-[4-(2-acetamidoethoxy)phenyl]-2-amino-propanoic acid
  SITE 3: note = 4-[(2S)-2-amino-2-carboxy-ethyl]benzoic acid
  SITE 5: note = (2S,4R)-4-aminopyrrolidine-2-carboxylic acid
  SITE 6: note = (2S,3S)-2-amino-3-(1-naphthyl)butanoic acid
  SITE 7: note = N4,N4-dimethyl-L-asparagine
  SITE 8: note = N-Methyl-D-aspartic acid
  SITE 10: note = 4-[4-[(2S)-2-amino-2-carboxy-ethyl]phenyl]benzoic acid
  SITE 11: note = (S)-2-amino-5-methoxypentanoic acid
  SITE 13: note = (2R,4S)-4-aminopyrrolidine-2-carboxylic acid
  SITE 14: note = (2S,4R)-4-(4-(pyrimidin-5-yl)benzyl) pyrrolidine-2-carboxylic acid
XWFGPXXXGXXAPX

SEQ ID NO: 125 - protein, 14 aa, synthetic construct
  SITE 1: note (2S)-3-[4-(2-acetamidoethoxy)phenyl]-2-amino-propanoic acid
  SITE 3: note = 4-[(2S)-2-amino-2-carboxy-ethyl]benzoic acid
  SITE 5: note = (2S,4R)-4-aminopyrrolidine-2-carboxylic acid
  SITE 6: note = (2S,3S)-2-amino-3-(1-naphthyl)butanoic acid
  SITE 7: note = (2S)-2-amino-5-ureido-pentanoic acid
  SITE 8: note = N-Methyl-D-aspartic acid
  SITE 10: note = 4-[4-[(2S)-2-amino-2-carboxy-ethyl]phenyl]benzoic acid
  SITE 11: note = (S)-2-amino-5-methoxypentanoic acid
  SITE 13: note = (2R,4S)-4-aminopyrrolidine-2-carboxylic acid
  SITE 14: note = (2S,4R)-4-(4-(pyrimidin-5-yl)benzyl) pyrrolidine-2-carboxylic acid
XWFGPXXXGXXAPX

SEQ ID NO: 126 - protein, 14 aa, synthetic construct
  SITE 1: note (2S)-3-[4-(2-acetamidoethoxy)phenyl]-2-amino-propanoic acid
  SITE 3: note = 4-[(2S)-2-amino-2-carboxy-ethyl]benzoic acid
  SITE 6: note = (2S,3S)-2-amino-3-(1-naphthyl)butanoic acid
  SITE 8: note = D-N-methyl-Alanine
  SITE 10: note = 4-[4-[(2S)-2-amino-2-carboxy-ethyl]phenyl]benzoic acid
  SITE 11: note = (S)-2-Amino-3-(carboxyamino)propanoic acid
  SITE 13: note = (2R,4S)-4-aminopyrrolidine-2-carboxylic acid
  SITE 14: note = (2S,4R)-4-(4-(pyrimidin-5-yl)benzyl) pyrrolidine-2-carboxylic acid
XWFGPXDXGXXAPX

SEQ ID NO: 127 - protein, 14 aa, synthetic construct
  SITE 1: note (2S)-3-[4-(2-acetamidoethoxy)phenyl]-2-amino-propanoic acid
  SITE 3: note = 4-[(2S)-2-amino-2-carboxy-ethyl]benzoic acid
  SITE 5: note = (2S,4R)-4-Fluoropyrrolidine-2-carboxylic acid
  SITE 6: note = (2S,3S)-2-amino-3-(1-naphthyl)butanoic acid
  SITE 8: note = D-N-methyl-Alanine
  SITE 10: note = 4-[4-[(2S)-2-amino-2-carboxy-ethyl]phenyl]benzoic acid
  SITE 11: note = (S)-2-Amino-3-(carboxyamino)propanoic acid
  SITE 13: note = (2R,4S)-4-aminopyrrolidine-2-carboxylic acid
  SITE 14: note = (2S,4R)-4-(4-(pyrimidin-5-yl)benzyl) pyrrolidine-2-carboxylic acid
XWFGXXDXGXXAPX

SEQ ID NO: 128 - protein, 14 aa, synthetic construct
  SITE 1: note (2S)-3-[4-(2-acetamidoethoxy)phenyl]-2-amino-propanoic acid
  SITE 3: note = 4-[(2S)-2-amino-2-carboxy-ethyl]benzoic acid
  SITE 5: note = (2S,4S)-4-Fluoropyrrolidine-2-carboxylic acid
  SITE 6: note = (2S,3S)-2-amino-3-(1-naphthyl)butanoic acid
  SITE 8: note = D-N-methyl-Alanine
  SITE 10: note = 4-[4-[(2S)-2-amino-2-carboxy-ethyl]phenyl]benzoic acid
  SITE 11: note = (S)-2-Amino-3-(carboxyamino)propanoic acid
  SITE 13: note = (2R,4S)-4-aminopyrrolidine-2-carboxylic acid
  SITE 14: note = (2S,4R)-4-(4-(pyrimidin-5-yl)benzyl) pyrrolidine-2-carboxylic acid
XWFGXXDXGXXAPX

SEQ ID NO: 129 - protein, 14 aa, synthetic construct
  SITE 1: note (2S)-3-[4-(2-acetamidoethoxy)phenyl]-2-amino-propanoic acid
  SITE 3: note = 4-[(2S)-2-amino-2-carboxy-ethyl]benzoic acid
  SITE 5: note = (2S,4R)-4-Hydroxypyrrolidine-2-carboxylic acid
  SITE 6: note = (2S,3S)-2-amino-3-(1-naphthyl)butanoic acid
  SITE 8: note = D-N-methyl-Alanine
  SITE 10: note = 4-[4-[(2S)-2-amino-2-carboxy-ethyl]phenyl]benzoic acid
  SITE 11: note = (S)-2-Amino-3-(carboxyamino)propanoic acid
  SITE 13: note = (2R,4S)-4-aminopyrrolidine-2-carboxylic acid
  SITE 14: note = (2S,4R)-4-(4-(pyrimidin-5-yl)benzyl) pyrrolidine-2-carboxylic acid
XWFGXXDXGXXAPX

SEQ ID NO: 130 - protein, 14 aa, synthetic construct
  SITE 1: note (2S)-3-[4-(2-acetamidoethoxy)phenyl]-2-amino-propanoic acid
  SITE 3: note = 4-[(2S)-2-amino-2-carboxy-ethyl]benzoic acid
  SITE 5: note = (2S,4S)-4-Hydroxypyrrolidine-2-carboxylic acid
  SITE 6: note = (2S,3S)-2-amino-3-(1-naphthyl)butanoic acid
  SITE 8: note = D-N-methyl-Alanine
  SITE 10: note = 4-[4-[(2S)-2-amino-2-carboxy-ethyl]phenyl]benzoic acid
  SITE 11: note = (S)-2-Amino-3-(carboxyamino)propanoic acid
  SITE 13: note = (2R,4S)-4-aminopyrrolidine-2-carboxylic acid
  SITE 14: note = (2S,4R)-4-(4-(pyrimidin-5-yl)benzyl) pyrrolidine-2-carboxylic acid
XWFGXXDXGXXAPX

SEQ ID NO: 131 - protein, 14 aa, synthetic construct
  SITE 1: note (2S)-3-[4-(2-acetamidoethoxy)phenyl]-2-amino-propanoic acid
  SITE 3: note = 4-[(2S)-2-amino-2-carboxy-ethyl]benzoic acid
  SITE 6: note = (2S,3S)-2-amino-3-(1-naphthyl)butanoic acid
  SITE 8: note = D-N-methyl-Alanine
  SITE 10: note = 4-[4-[(2S)-2-amino-2-carboxy-ethyl]phenyl]benzoic acid
  SITE 11: note = (2S)-2-amino-3-(4-pyridyl)propanoic acid
  SITE 13: note = (2R,4S)-4-aminopyrrolidine-2-carboxylic acid
  SITE 14: note = (2S,4R)-4-(4-(pyrimidin-5-yl)benzyl) pyrrolidine-2-carboxylic acid
XWFGPXDXGXXAPX

SEQ ID NO: 132 - protein, 14 aa, synthetic construct
  SITE 1: note (2S)-3-[4-(2-acetamidoethoxy)phenyl]-2-amino-propanoic acid
  SITE 3: note = 4-[(2S)-2-amino-2-carboxy-ethyl]benzoic acid
  SITE 5: note = (2S,4R)-4-Fluoropyrrolidine-2-carboxylic acid
  SITE 6: note = (2S,3S)-2-amino-3-(1-naphthyl)butanoic acid
  SITE 8: note = D-N-methyl-Alanine
  SITE 10: note = 4-[4-[(2S)-2-amino-2-carboxy-ethyl]phenyl]benzoic acid
  SITE 11: note = (2S)-2-amino-3-(4-pyridyl)propanoic acid
  SITE 13: note = (2R,4S)-4-aminopyrrolidine-2-carboxylic acid
  SITE 14: note = (2S,4R)-4-(4-(pyrimidin-5-yl)benzyl) pyrrolidine-2-carboxylic acid
XWFGXXDXGXXAPX

SEQ ID NO: 133 - protein, 14 aa, synthetic construct
  SITE 1: note (2S)-3-[4-(2-acetamidoethoxy)phenyl]-2-amino-propanoic acid
  SITE 3: note = 4-[(2S)-2-amino-2-carboxy-ethyl]benzoic acid
  SITE 5: note = (2S,4S)-4-Fluoropyrrolidine-2-carboxylic acid
  SITE 6: note = (2S,3S)-2-amino-3-(1-naphthyl)butanoic acid
  SITE 8: note = D-N-methyl-Alanine
  SITE 10: note = 4-[4-[(2S)-2-amino-2-carboxy-ethyl]phenyl]benzoic acid
  SITE 11: note = (2S)-2-amino-3-(4-pyridyl)propanoic acid
  SITE 13: note = (2R,4S)-4-aminopyrrolidine-2-carboxylic acid
  SITE 14: note = (2S,4R)-4-(4-(pyrimidin-5-yl)benzyl) pyrrolidine-2-carboxylic acid
XWFGXXDXGXXAPX

SEQ ID NO: 134 - protein, 14 aa, synthetic construct
  SITE 1: note (2S)-3-[4-(2-acetamidoethoxy)phenyl]-2-amino-propanoic acid
  SITE 3: note = 4-[(2S)-2-amino-2-carboxy-ethyl]benzoic acid
  SITE 5: note = (2S,4R)-4-Hydroxypyrrolidine-2-carboxylic acid
  SITE 6: note = (2S,3S)-2-amino-3-(1-naphthyl)butanoic acid
  SITE 8: note = D-N-methyl-Alanine
  SITE 10: note = 4-[4-[(2S)-2-amino-2-carboxy-ethyl]phenyl]benzoic acid
  SITE 11: note = (2S)-2-amino-3-(4-pyridyl)propanoic acid
  SITE 13: note = (2R,4S)-4-aminopyrrolidine-2-carboxylic acid
  SITE 14: note = (2S,4R)-4-(4-(pyrimidin-5-yl)benzyl) pyrrolidine-2-carboxylic acid
XWFGXXDXGXXAPX

SEQ ID NO: 135 - protein, 14 aa, synthetic construct
  SITE 1: note (2S)-3-[4-(2-acetamidoethoxy)phenyl]-2-amino-propanoic acid
  SITE 3: note = 4-[(2S)-2-amino-2-carboxy-ethyl]benzoic acid
  SITE 5: note = (2S,4S)-4-Hydroxypyrrolidine-2-carboxylic acid
  SITE 6: note = (2S,3S)-2-amino-3-(1-naphthyl)butanoic acid
  SITE 8: note = D-N-methyl-Alanine
  SITE 10: note = 4-[4-[(2S)-2-amino-2-carboxy-ethyl]phenyl]benzoic acid
  SITE 11: note = (2S)-2-amino-3-(4-pyridyl)propanoic acid
  SITE 13: note = (2R,4S)-4-aminopyrrolidine-2-carboxylic acid
  SITE 14: note = (2S,4R)-4-(4-(pyrimidin-5-yl)benzyl) pyrrolidine-2-carboxylic acid
XWFGXXDXGXXAPX

SEQ ID NO: 136 - protein, 14 aa, synthetic construct
  SITE 1: note (2S)-3-[4-(2-acetamidoethoxy)phenyl]-2-amino-propanoic acid
  SITE 3: note = 4-[(2S)-2-amino-2-carboxy-ethyl]benzoic acid
  SITE 5: note = (2S,4R)-4-aminopyrrolidine-2-carboxylic acid
  SITE 6: note = (2S,3S)-2-amino-3-(1-naphthyl)butanoic acid
  SITE 8: note = D-N-methyl-Alanine
  SITE 10: note = 4-[4-[(2S)-2-amino-2-carboxy-ethyl]phenyl]benzoic acid
  SITE 11: note = (S)-2-Amino-3-(carboxyamino)propanoic acid
  SITE 13: note = D-proline
  SITE 14: note = (2S,4R)-4-(4-(pyrimidin-5-yl)benzyl) pyrrolidine-2-carboxylic acid
XWFGPXDXGXXAPX

SEQ ID NO: 137 - protein, 14 aa, synthetic construct
  SITE 1: note (2S)-3-[4-(2-acetamidoethoxy)phenyl]-2-amino-propanoic acid
  SITE 3: note = 4-[(2S)-2-amino-2-carboxy-ethyl]benzoic acid
  SITE 5: note = (2S,4R)-4-aminopyrrolidine-2-carboxylic acid
  SITE 6: note = (2S,3S)-2-amino-3-(1-naphthyl)butanoic acid
  SITE 8: note = D-N-methyl-Alanine
  SITE 10: note = 4-[4-[(2S)-2-amino-2-carboxy-ethyl]phenyl]benzoic acid
  SITE 11: note = (2S)-2,4-diaminobutanoic acid
  SITE 13: note = D-proline
  SITE 14: note = (2S,4R)-4-(4-(pyrimidin-5-yl)benzyl) pyrrolidine-2-carboxylic acid
XWFGPXDXGXXAPX

SEQ ID NO: 138 - protein, 14 aa, synthetic construct
  SITE 1: note = 4-[4-[(2S)-2-amino-2-carboxy-ethyl]phenyl]benzoic acid
  SITE 3: note = 4-[(2S)-2-amino-2-carboxy-ethyl]benzoic acid
  SITE 5: note = (2S,4R)-4-aminopyrrolidine-2-carboxylic acid
  SITE 6: note = (2S,3S)-2-amino-3-(1-naphthyl)butanoic acid
  SITE 8: note = D-N-methyl-Alanine
  SITE 10: note = 4-[4-[(2S)-2-amino-2-carboxy-ethyl]phenyl]benzoic acid
  SITE 11: note = O-Methyl-L-serine
  SITE 13: note = D-proline
  SITE 14: note = (2S,4R)-4-(4-(pyrimidin-5-yl)benzyl) pyrrolidine-2-carboxylic acid
XWFGPXDXGXSAPX

SEQ ID NO: 139 - protein, 14 aa, synthetic construct
  SITE 1: note = 4-[4-[(2S)-2-amino-2-carboxy-ethyl]phenyl]benzoic acid
  SITE 3: note = 4-[(2S)-2-amino-2-carboxy-ethyl]benzoic acid
  SITE 5: note = (2S,4R)-4-aminopyrrolidine-2-carboxylic acid
  SITE 6: note = (2S,3S)-2-amino-3-(1-naphthyl)butanoic acid
  SITE 8: note = D-N-methyl-Alanine
  SITE 10: note = 4-[4-[(2S)-2-amino-2-carboxy-ethyl]phenyl]benzoic acid
  SITE 13: note = D-proline
  SITE 14: note = (2S,4R)-4-(4-(pyrimidin-5-yl)benzyl) pyrrolidine-2-carboxylic acid
XWFGPXDXGXSAPX

SEQ ID NO: 140 - protein, 14 aa, synthetic construct
  SITE 1: note (2S)-3-[4-(2-acetamidoethoxy)phenyl]-2-amino-propanoic acid
  SITE 3: note = 4-[(2S)-2-amino-2-carboxy-ethyl]benzoic acid
  SITE 5: note = (2S,4R)-4-aminopyrrolidine-2-carboxylic acid
  SITE 6: note = (2S,3S)-2-amino-3-(1-naphthyl)butanoic acid
  SITE 8: note = D-N-methyl-Alanine
  SITE 10: note = 4-[4-[(2S)-2-amino-2-carboxy-ethyl]phenyl]benzoic acid
  SITE 11: note = (2S,4R)-4-Hydroxypyrrolidine-2-carboxylic acid
  SITE 13: note = D-proline
  SITE 14: note = (2S,4R)-4-(4-(pyrimidin-5-yl)benzyl) pyrrolidine-2-carboxylic acid
XWFGPXDXGXXAPX

SEQ ID NO: 141 - protein, 14 aa, synthetic construct
  SITE 1: note (2S)-3-[4-(2-acetamidoethoxy)phenyl]-2-amino-propanoic acid
  SITE 3: note = 4-[(2S)-2-amino-2-carboxy-ethyl]benzoic acid
  SITE 5: note = (2S,4R)-4-aminopyrrolidine-2-carboxylic acid
  SITE 6: note = (2S,3S)-2-amino-3-(1-naphthyl)butanoic acid
  SITE 8: note = D-N-methyl-Alanine
  SITE 10: note = 4-[4-[(2S)-2-amino-2-carboxy-ethyl]phenyl]benzoic acid
  SITE 11: note = (S)-2-Aminooctanedioic acid
  SITE 13: note = D-proline
  SITE 14: note = (2S,4R)-4-(4-(pyrimidin-5-yl)benzyl) pyrrolidine-2-carboxylic acid
XWFGPXDXGXXAPX

SEQ ID NO: 142 - protein, 14 aa, synthetic construct
  SITE 1: note (2S)-3-[4-(2-acetamidoethoxy)phenyl]-2-amino-propanoic acid
  SITE 3: note = 4-[(2S)-2-amino-2-carboxy-ethyl]benzoic acid
  SITE 5: note = (2S,4R)-4-aminopyrrolidine-2-carboxylic acid
  SITE 6: note = (2S,3S)-2-amino-3-(1-naphthyl)butanoic acid
  SITE 8: note = D-N-methyl-Alanine
  SITE 10: note = 4-[4-[(2S)-2-amino-2-carboxy-ethyl]phenyl]benzoic acid
  SITE 11: note = (2S)-2-amino-5-ureido-pentanoic acid
  SITE 13: note = D-proline
  SITE 14: note = (2S,4R)-4-(4-(pyrimidin-5-yl)benzyl) pyrrolidine-2-carboxylic acid
XWFGPXDXGXXAPX

SEQ ID NO: 143 - protein, 14 aa, synthetic construct
  SITE 1: note (2S)-3-[4-(2-acetamidoethoxy)phenyl]-2-amino-propanoic acid
  SITE 3: note = 4-[(2S)-2-amino-2-carboxy-ethyl]benzoic acid
  SITE 6: note = (2S,3S)-2-amino-3-(1-naphthyl)butanoic acid
  SITE 8: note = D-N-methyl-Alanine
  SITE 10: note = 4-[4-[(2S)-2-amino-2-carboxy-ethyl]phenyl]benzoic acid
  SITE 11: note = (S)-2-amino-5-methoxypentanoic acid
  SITE 13: note = (2R,4S)-4-aminopyrrolidine-2-carboxylic acid
  SITE 14: note = (2S,4R)-4-(4-(pyrimidin-5-yl)benzyl) pyrrolidine-2-carboxylic acid
XWFGPXDXGXXAPX

SEQ ID NO: 144 - protein, 14 aa, synthetic construct
  SITE 1: note (2S)-3-[4-(2-acetamidoethoxy)phenyl]-2-amino-propanoic acid
  SITE 3: note = 4-[(2S)-2-amino-2-carboxy-ethyl]benzoic acid
  SITE 5: note = (2S,4R)-4-Fluoropyrrolidine-2-carboxylic acid
  SITE 6: note = (2S,3S)-2-amino-3-(1-naphthyl)butanoic acid
  SITE 8: note = D-N-methyl-Alanine
  SITE 10: note = 4-[4-[(2S)-2-amino-2-carboxy-ethyl]phenyl]benzoic acid
  SITE 11: note = (S)-2-amino-5-methoxypentanoic acid
  SITE 13: note = (2R,4S)-4-aminopyrrolidine-2-carboxylic acid
  SITE 14: note = (2S,4R)-4-(4-(pyrimidin-5-yl)benzyl) pyrrolidine-2-carboxylic acid
XWFGXXDXGXXAPX

SEQ ID NO: 145 - protein, 14 aa, synthetic construct
  SITE 1: note (S)-3-(6-(4-Acetylpiperazin-1-yl)pyridin-3-yl)-2-aminopropa noic acid
  SITE 3: note = 4-[(2S)-2-amino-2-carboxy-ethyl]benzoic acid
  SITE 5: note = (2S,4S)-4-Fluoropyrrolidine-2-carboxylic acid
  SITE 6: note = (2S,3S)-2-amino-3-(1-naphthyl)butanoic acid
  SITE 8: note = D-N-methyl-Alanine
  SITE 10: note = 4-[4-[(2S)-2-amino-2-carboxy-ethyl]phenyl]benzoic acid
  SITE 11: note = (S)-2-amino-5-methoxypentanoic acid
  SITE 13: note = (2R,4S)-4-aminopyrrolidine-2-carboxylic acid
  SITE 14: note = (2S,4R)-4-(4-(pyrimidin-5-yl)benzyl) pyrrolidine-2-carboxylic acid
XWFGXXDXGXXAPX

SEQ ID NO: 146 - protein, 14 aa, synthetic construct
  SITE 1: note (S)-3-(6-(4-Acetylpiperazin-1-yl)pyridin-3-yl)-2-aminopropa noic acid
  SITE 3: note = 4-[(2S)-2-amino-2-carboxy-ethyl]benzoic acid
  SITE 5: note = (2S,4R)-4-Hydroxypyrrolidine-2-carboxylic acid
  SITE 6: note = (2S,3S)-2-amino-3-(1-naphthyl)butanoic acid
  SITE 8: note = D-N-methyl-Alanine
  SITE 10: note = 4-[4-[(2S)-2-amino-2-carboxy-ethyl]phenyl]benzoic acid
  SITE 11: note = (S)-2-amino-5-methoxypentanoic acid
  SITE 13: note = (2R,4S)-4-aminopyrrolidine-2-carboxylic acid
  SITE 14: note = (2S,4R)-4-(4-(pyrimidin-5-yl)benzyl) pyrrolidine-2-carboxylic acid
XWFGXXDXGXXAPX

SEQ ID NO: 147 - protein, 14 aa, synthetic construct
  SITE 1: note (S)-3-(6-(4-Acetylpiperazin-1-yl)pyridin-3-yl)-2-aminopropa noic acid
  SITE 3: note = 4-[(2S)-2-amino-2-carboxy-ethyl]benzoic acid
  SITE 5: note = (2S,4S)-4-Hydroxypyrrolidine-2-carboxylic acid
  SITE 6: note = (2S,3S)-2-amino-3-(1-naphthyl)butanoic acid
  SITE 8: note = D-N-methyl-Alanine
  SITE 10: note = 4-[4-[(2S)-2-amino-2-carboxy-ethyl]phenyl]benzoic acid
  SITE 11: note = (S)-2-amino-5-methoxypentanoic acid
  SITE 13: note = (2R,4S)-4-aminopyrrolidine-2-carboxylic acid
  SITE 14: note = (2S,4R)-4-(4-(pyrimidin-5-yl)benzyl) pyrrolidine-2-carboxylic acid
XWFGXXDXGXXAPX

SEQ ID NO: 148 - protein, 14 aa, synthetic construct
  SITE 1: note (S)-3-(6-(4-Acetylpiperazin-1-yl)pyridin-3-yl)-2-aminopropa noic acid
  SITE 3: note = 4-[(2S)-2-amino-2-carboxy-ethyl]benzoic acid
  SITE 5: note = (2S,4R)-4-aminopyrrolidine-2-carboxylic acid
  SITE 6: note = (2S,3S)-2-amino-3-(4-chloro-1H-indol-3-yl)butanoic acid
  SITE 8: note = D-N-methyl-Alanine
  SITE 10: note = 4-[4-[(2S)-2-amino-2-carboxy-ethyl]phenyl]benzoic acid
  SITE 11: note = (S)-2-amino-5-methoxypentanoic acid
  SITE 13: note = (2R,4S)-4-aminopyrrolidine-2-carboxylic acid
  SITE 14: note = (2S,4R)-4-(4-(pyrimidin-5-yl)benzyl) pyrrolidine-2-carboxylic acid
XWFGPXDXGXXAPX

SEQ ID NO: 149 - protein, 14 aa, synthetic construct
  SITE 1: note (S)-3-(6-(4-Acetylpiperazin-1-yl)pyridin-3-yl)-2-aminopropa noic acid
  SITE 3: note = 4-[(2S)-2-amino-2-carboxy-ethyl]benzoic acid
  SITE 5: note = (2S,4R)-4-aminopyrrolidine-2-carboxylic acid
  SITE 6: note = (2S,3S)-2-amino-3-(4-chloro-1H-indol-3-yl)butanoic acid
  SITE 8: note = D-N-methyl-Alanine
  SITE 10: note = 4-[4-[(2S)-2-amino-2-carboxy-ethyl]phenyl]benzoic acid
  SITE 13: note = (2R,4S)-4-aminopyrrolidine-2-carboxylic acid
  SITE 14: note = (2S,4R)-4-(4-(pyrimidin-5-yl)benzyl) pyrrolidine-2-carboxylic acid
XWFGPXDXGXYAPX

SEQ ID NO: 150 - protein, 14 aa, synthetic construct
  SITE 1: note (S)-3-(4-(4-Acetylpiperazin-1-yl)phenyl)-2-aminopropanoic acid
  SITE 2: note = (S)-2-Amino-3-(6-fluoro-1H-indol-3-yl)propanoic acid
  SITE 3: note = 4-[(2S)-2-amino-2-carboxy-ethyl]benzoic acid
  SITE 5: note = (2S,4R)-4-aminopyrrolidine-2-carboxylic acid
  SITE 6: note = (2S,3S)-2-amino-3-(4-chloro-1H-indol-3-yl)butanoic acid
  SITE 8: note = D-N-methyl-Alanine
  SITE 10: note = 4-[4-[(2S)-2-amino-2-carboxy-ethyl]phenyl]benzoic acid
  SITE 13: note = (2R,4S)-4-aminopyrrolidine-2-carboxylic acid
  SITE 14: note = (2S,4R)-4-(4-(pyrimidin-5-yl)benzyl) pyrrolidine-2-carboxylic acid
XXFGPXDXGXYAPX

SEQ ID NO: 151 - protein, 14 aa, synthetic construct
  SITE 1: note (2S)-3-[4-(2-acetamidoethoxy)phenyl]-2-amino-propanoic acid
  SITE 3: note = 4-[(2S)-2-amino-2-carboxy-ethyl]benzoic acid
  SITE 5: note = (2S,4R)-4-aminopyrrolidine-2-carboxylic acid
  SITE 6: note = (2S,3S)-2-amino-3-(1-naphthyl)butanoic acid
  SITE 8: note = D-N-methyl-Alanine
  SITE 10: note = 4-[4-[(2S)-2-amino-2-carboxy-ethyl]phenyl]benzoic acid
  SITE 11: note = (S)-2-amino-5-methoxypentanoic acid
  SITE 12: note = (S)-2-Aminopentanoic acid
  SITE 13: note = (2R,4S)-4-aminopyrrolidine-2-carboxylic acid
  SITE 14: note = (2S,4R)-4-(4-(pyrimidin-5-yl)benzyl) pyrrolidine-2-carboxylic acid
XWFGPXNXGXXXPX

SEQ ID NO: 152 - protein, 14 aa, synthetic construct
  SITE 1: note (2S)-3-[4-(2-acetamidoethoxy)phenyl]-2-amino-propanoic acid
  SITE 3: note = 4-[(2S)-2-amino-2-carboxy-ethyl]benzoic acid
  SITE 5: note = (2S,4R)-4-aminopyrrolidine-2-carboxylic acid
  SITE 6: note = (2S,3S)-2-amino-3-(1-naphthyl)butanoic acid
  SITE 7: note = N4,N4-dimethyl-L-asparagine
  SITE 8: note = D-N-methyl-Alanine
  SITE 10: note = 4-[4-[(2S)-2-amino-2-carboxy-ethyl]phenyl]benzoic acid
  SITE 11: note = (S)-2-amino-5-methoxypentanoic acid
  SITE 12: note = (S)-2-Aminopentanoic acid
  SITE 13: note = (2R,4S)-4-aminopyrrolidine-2-carboxylic acid
  SITE 14: note = (2S,4R)-4-(4-(pyrimidin-5-yl)benzyl) pyrrolidine-2-carboxylic acid
XWFGPXXXGXXXPX

SEQ ID NO: 153 - protein, 14 aa, synthetic construct
  SITE 1: note (2S)-3-[4-(2-acetamidoethoxy)phenyl]-2-amino-propanoic acid
  SITE 3: note = 4-[(2S)-2-amino-2-carboxy-ethyl]benzoic acid
  SITE 5: note = (2S,4R)-4-aminopyrrolidine-2-carboxylic acid
  SITE 6: note = (2S,3S)-2-amino-3-(1-naphthyl)butanoic acid
  SITE 7: note = (2S)-2-amino-5-ureido-pentanoic acid
  SITE 8: note = D-N-methyl-Alanine
  SITE 10: note = 4-[4-[(2S)-2-amino-2-carboxy-ethyl]phenyl]benzoic acid
  SITE 11: note = (S)-2-amino-5-methoxypentanoic acid
  SITE 12: note = (S)-2-Aminopentanoic acid
  SITE 13: note = (2R,4S)-4-aminopyrrolidine-2-carboxylic acid
  SITE 14: note = (2S,4R)-4-(4-(pyrimidin-5-yl)benzyl) pyrrolidine-2-carboxylic acid
XWFGPXXXGXXXPX

SEQ ID NO: 154 - protein, 14 aa, synthetic construct
  SITE 1: note (2S)-3-[4-(2-acetamidoethoxy)phenyl]-2-amino-propanoic acid
  SITE 3: note = 4-[(2S)-2-amino-2-carboxy-ethyl]benzoic acid
  SITE 5: note = (2S,4R)-4-aminopyrrolidine-2-carboxylic acid
  SITE 6: note = (2S,3S)-2-amino-3-(1-naphthyl)butanoic acid
  SITE 8: note = D-N-methyl-Alanine
  SITE 10: note = 4-[4-[(2S)-2-amino-2-carboxy-ethyl]phenyl]benzoic acid
  SITE 11: note = (S)-2-amino-5-methoxypentanoic acid
  SITE 12: note = (S)-2-Aminopentanoic acid
  SITE 13: note = (2R,4S)-4-aminopyrrolidine-2-carboxylic acid
  SITE 14: note = (2S,4R)-4-(4-(pyrimidin-5-yl)benzyl) pyrrolidine-2-carboxylic acid
XWFGPXQXGXXXPX

SEQ ID NO: 155 - protein, 14 aa, synthetic construct
  SITE 1: note (2S)-3-[4-(2-acetamidoethoxy)phenyl]-2-amino-propanoic acid
  SITE 3: note = 4-[(2S)-2-amino-2-carboxy-ethyl]benzoic acid
  SITE 5: note = (2S,4R)-4-aminopyrrolidine-2-carboxylic acid
  SITE 6: note = (2S,3S)-2-amino-3-(1-naphthyl)butanoic acid
  SITE 7: note = N5,N5-Dimethyl-L-glutamine
  SITE 8: note = D-N-methyl-Alanine
  SITE 10: note = 4-[4-[(2S)-2-amino-2-carboxy-ethyl]phenyl]benzoic acid
  SITE 11: note = (S)-2-amino-5-methoxypentanoic acid
  SITE 12: note = (S)-2-Aminopentanoic acid
  SITE 13: note = (2R,4S)-4-aminopyrrolidine-2-carboxylic acid
  SITE 14: note = (2S,4R)-4-(4-(pyrimidin-5-yl)benzyl) pyrrolidine-2-carboxylic acid
XWFGPXXXGXXXPX

SEQ ID NO: 156 - protein, 14 aa, synthetic construct
  SITE 1: note (2S)-3-[4-(2-acetamidoethoxy)phenyl]-2-amino-propanoic acid
  SITE 3: note (S)-2-Amino-3-(4-(5-oxo-4,5-dihydro-1,2,4-oxadiazol-3-yl)ph enyl)propanoic acid
  SITE 5: note = (2S,4R)-4-aminopyrrolidine-2-carboxylic acid
  SITE 6: note = (2S,3S)-2-amino-3-(1-naphthyl)butanoic acid
  SITE 7: note = (2S)-2-amino-5-ureido-pentanoic acid
  SITE 8: note = D-N-methyl-Alanine
  SITE 10: note = 4-[4-[(2S)-2-amino-2-carboxy-ethyl]phenyl]benzoic acid
  SITE 11: note = (S)-2-amino-5-methoxypentanoic acid
  SITE 12: note = (S)-2-Aminopentanoic acid
  SITE 13: note = (2R,4S)-4-aminopyrrolidine-2-carboxylic acid
  SITE 14: note = (2S,4R)-4-(4-(pyrimidin-5-yl)benzyl) pyrrolidine-2-carboxylic acid
XWXGPXXXGXXXPX

SEQ ID NO: 157 - protein, 14 aa, synthetic construct
  SITE 1: note (2S)-3-[4-(2-acetamidoethoxy)phenyl]-2-amino-propanoic acid
  SITE 3: note = (S)-2-Amino-3-(4-carbamoylphenyl)propanoic acid
  SITE 5: note = (2S,4R)-4-aminopyrrolidine-2-carboxylic acid
  SITE 6: note = (2S,3S)-2-amino-3-(1-naphthyl)butanoic acid
  SITE 8: note = D-N-methyl-Alanine
  SITE 10: note = 4-[4-[(2S)-2-amino-2-carboxy-ethyl]phenyl]benzoic acid
  SITE 11: note = (S)-2-amino-5-methoxypentanoic acid
  SITE 12: note = (S)-2-Aminopentanoic acid
  SITE 13: note = (2R,4S)-4-aminopyrrolidine-2-carboxylic acid
  SITE 14: note = (2S,4R)-4-(4-(pyrimidin-5-yl)benzyl) pyrrolidine-2-carboxylic acid
XWFGPXDXGXXXPX

SEQ ID NO: 158 - protein, 14 aa, synthetic construct
  SITE 1: note (2S)-3-[4-(2-acetamidoethoxy)phenyl]-2-amino-propanoic acid
  SITE 3: note = (S)-2-Amino-3-(4-carbamoylphenyl)propanoic acid
  SITE 5: note = (2S,4R)-4-aminopyrrolidine-2-carboxylic acid
  SITE 6: note = (2S,3S)-2-amino-3-(1-naphthyl)butanoic acid
  SITE 7: note = N4,N4-dimethyl-L-asparagine
  SITE 8: note = D-N-methyl-Alanine
  SITE 10: note = 4-[4-[(2S)-2-amino-2-carboxy-ethyl]phenyl]benzoic acid
  SITE 11: note = (S)-2-amino-5-methoxypentanoic acid
  SITE 12: note = (S)-2-Aminopentanoic acid
  SITE 13: note = (2R,4S)-4-aminopyrrolidine-2-carboxylic acid
  SITE 14: note = (2S,4R)-4-(4-(pyrimidin-5-yl)benzyl) pyrrolidine-2-carboxylic acid
XWFGPXXXGXXXPX

SEQ ID NO: 159 - protein, 14 aa, synthetic construct
  SITE 1: note (2S)-3-[4-(2-acetamidoethoxy)phenyl]-2-amino-propanoic acid
  SITE 3: note = (S)-2-Amino-3-(4-carbamoylphenyl)propanoic acid
  SITE 5: note = (2S,4R)-4-aminopyrrolidine-2-carboxylic acid
  SITE 6: note = (2S,3S)-2-amino-3-(1-naphthyl)butanoic acid
  SITE 7: note = (2S)-2-amino-5-ureido-pentanoic acid
  SITE 8: note = D-N-methyl-Alanine
  SITE 10: note = 4-[4-[(2S)-2-amino-2-carboxy-ethyl]phenyl]benzoic acid
  SITE 11: note = (S)-2-amino-5-methoxypentanoic acid
  SITE 12: note = (S)-2-Aminopentanoic acid
  SITE 13: note = (2R,4S)-4-aminopyrrolidine-2-carboxylic acid
  SITE 14: note = (2S,4R)-4-(4-(pyrimidin-5-yl)benzyl) pyrrolidine-2-carboxylic acid
XWFGPXXXGXXXPX

SEQ ID NO: 160 - protein, 14 aa, synthetic construct
  SITE 1: note (2S)-3-[4-(2-acetamidoethoxy)phenyl]-2-amino-propanoic acid
  SITE 3: note = (S)-2-Amino-3-(4-sulfamoylphenyl)propanoic acid
  SITE 5: note = (2S,4R)-4-aminopyrrolidine-2-carboxylic acid
  SITE 6: note = (2S,3S)-2-amino-3-(1-naphthyl)butanoic acid
  SITE 8: note = D-N-methyl-Alanine
  SITE 10: note = 4-[4-[(2S)-2-amino-2-carboxy-ethyl]phenyl]benzoic acid
  SITE 11: note = (S)-2-amino-5-methoxypentanoic acid
  SITE 12: note = (S)-2-Aminopentanoic acid
  SITE 13: note = (2R,4S)-4-aminopyrrolidine-2-carboxylic acid
  SITE 14: note = (2S,4R)-4-(4-(pyrimidin-5-yl)benzyl) pyrrolidine-2-carboxylic acid
XWXGPXDXGXXXPX

SEQ ID NO: 161 - protein, 14 aa, synthetic construct
  SITE 1: note (2S)-3-[4-(2-acetamidoethoxy)phenyl]-2-amino-propanoic acid
  SITE 3: note = 4-[(2S)-2-amino-2-carboxy-ethyl]benzoic acid
  SITE 5: note = (2S,4R)-4-aminopyrrolidine-2-carboxylic acid
  SITE 6: note = (2S,3S)-2-amino-3-(1-naphthyl)butanoic acid
  SITE 8: note = D-N-methyl-Alanine
  SITE 10: note (S)-2-Amino-3-(4'-carbamoyl-[1,1'-biphenyl]-4-yl)propanoic acid
  SITE 11: note = (S)-2-amino-5-methoxypentanoic acid
  SITE 12: note = (S)-2-Aminopentanoic acid
  SITE 13: note = (2R,4S)-4-aminopyrrolidine-2-carboxylic acid
  SITE 14: note = (2S,4R)-4-(4-(pyrimidin-5-yl)benzyl) pyrrolidine-2-carboxylic acid
XWFGPXDXGXXXPX

SEQ ID NO: 162 - protein, 14 aa, synthetic construct
  SITE 1: note (2S)-3-[4-(2-acetamidoethoxy)phenyl]-2-amino-propanoic acid
  SITE 3: note = 4-[(2S)-2-amino-2-carboxy-ethyl]benzoic acid
  SITE 5: note = (2S,4R)-4-aminopyrrolidine-2-carboxylic acid
  SITE 6: note = (2S,3S)-2-amino-3-(1-naphthyl)butanoic acid
  SITE 7: note = N4,N4-dimethyl-L-asparagine
  SITE 8: note = D-N-methyl-Alanine
  SITE 10: note (S)-2-Amino-3-(4'-carbamoyl-[1,1'-biphenyl]-4-yl)propanoic acid
  SITE 11: note = (S)-2-amino-5-methoxypentanoic acid
  SITE 12: note = (S)-2-Aminopentanoic acid
  SITE 13: note = (2R,4S)-4-aminopyrrolidine-2-carboxylic acid
  SITE 14: note = (2S,4R)-4-(4-(pyrimidin-5-yl)benzyl) pyrrolidine-2-carboxylic acid
XWFGPXXXGXXXPX

SEQ ID NO: 163 - protein, 14 aa, synthetic construct
  SITE 1: note (2S)-3-[4-(2-acetamidoethoxy)phenyl]-2-amino-propanoic acid
  SITE 3: note = 4-[(2S)-2-amino-2-carboxy-ethyl]benzoic acid
  SITE 5: note = (2S,4R)-4-aminopyrrolidine-2-carboxylic acid
  SITE 6: note = (2S,3S)-2-amino-3-(1-naphthyl)butanoic acid
  SITE 7: note = (2S)-2-amino-5-ureido-pentanoic acid
  SITE 8: note = D-N-methyl-Alanine
  SITE 10: note (S)-2-Amino-3-(4'-carbamoyl-[1,1'-biphenyl]-4-yl)propanoic acid
  SITE 11: note = (S)-2-amino-5-methoxypentanoic acid
  SITE 12: note = (S)-2-Aminopentanoic acid
  SITE 13: note = (2R,4S)-4-aminopyrrolidine-2-carboxylic acid
  SITE 14: note = (2S,4R)-4-(4-(pyrimidin-5-yl)benzyl) pyrrolidine-2-carboxylic acid
XWFGPXXXGXXXPX

SEQ ID NO: 164 - protein, 14 aa, synthetic construct
  SITE 1: note (2S)-3-[4-(2-acetamidoethoxy)phenyl]-2-amino-propanoic acid
  SITE 3: note = 4-[(2S)-2-amino-2-carboxy-ethyl]benzoic acid
  SITE 5: note = (2S,4R)-4-aminopyrrolidine-2-carboxylic acid
  SITE 6: note = (2S,3S)-2-amino-3-(1-naphthyl)butanoic acid
  SITE 8: note = D-N-methyl-Alanine
  SITE 10: note = 4-[4-[(2S)-2-amino-2-carboxy-ethyl]phenyl]benzoic acid
  SITE 13: note = (2R,4S)-4-aminopyrrolidine-2-carboxylic acid
  SITE 14: note = (2S,4R)-4-(4-(pyrimidin-5-yl)benzyl) pyrrolidine-2-carboxylic acid
XWFGPXDXGXAAPX

SEQ ID NO: 165 - protein, 14 aa, synthetic construct
  SITE 1: note (2S)-3-[4-(2-acetamidoethoxy)phenyl]-2-amino-propanoic acid
  SITE 3: note = 4-[(2S)-2-amino-2-carboxy-ethyl]benzoic acid
  SITE 5: note = (2S,4R)-4-aminopyrrolidine-2-carboxylic acid
  SITE 6: note = (2S,3S)-2-amino-3-(1-naphthyl)butanoic acid
  SITE 8: note = D-N-methyl-Alanine
  SITE 10: note = 4-[4-[(2S)-2-amino-2-carboxy-ethyl]phenyl]benzoic acid
  SITE 13: note = (2R,4S)-4-aminopyrrolidine-2-carboxylic acid
  SITE 14: note = (2S,4R)-4-(4-(pyrimidin-5-yl)benzyl) pyrrolidine-2-carboxylic acid
XWFGPXDXGXAGPX

SEQ ID NO: 166 - protein, 14 aa, synthetic construct
  SITE 1: note (2S)-3-[4-(2-acetamidoethoxy)phenyl]-2-amino-propanoic acid
  SITE 3: note = 4-[(2S)-2-amino-2-carboxy-ethyl]benzoic acid
  SITE 5: note = (2S,4R)-4-aminopyrrolidine-2-carboxylic acid
  SITE 6: note = (2S,3S)-2-amino-3-(1-naphthyl)butanoic acid
  SITE 8: note = D-N-methyl-Alanine
  SITE 10: note (S)-2-Amino-3-(4-((1r,4S)-4-(tert-butoxycarbonyl)cyclohexyl )phenyl)propanoic acid
  SITE 11: note = (S)-2-amino-5-methoxypentanoic acid
  SITE 12: note = (S)-2-Aminopentanoic acid
  SITE 13: note = (2R,4S)-4-aminopyrrolidine-2-carboxylic acid
  SITE 14: note = (2S,4R)-4-(4-(pyrimidin-5-yl)benzyl) pyrrolidine-2-carboxylic acid
XWFGPXDXGXXXPX

SEQ ID NO: 167 - protein, 14 aa, synthetic construct
  SITE 1: note (2S)-3-[4-(2-acetamidoethoxy)phenyl]-2-amino-propanoic acid
  SITE 3: note = 4-[(2S)-2-amino-2-carboxy-ethyl]benzoic acid
  SITE 5: note = (2S,4R)-4-aminopyrrolidine-2-carboxylic acid
  SITE 6: note = (2S,3S)-2-amino-3-(1-naphthyl)butanoic acid
  SITE 8: note = D-N-methyl-Alanine
  SITE 10: note (S)-2-Amino-3-(4-((1s,4R)-4-(tert-butoxycarbonyl)cyclohexyl )phenyl)propanoic acid
  SITE 11: note = (S)-2-amino-5-methoxypentanoic acid
  SITE 12: note = (S)-2-Aminopentanoic acid
  SITE 13: note = (2R,4S)-4-aminopyrrolidine-2-carboxylic acid
  SITE 14: note = (2S,4R)-4-(4-(pyrimidin-5-yl)benzyl) pyrrolidine-2-carboxylic acid
XWFGPXDXGXXXPX

SEQ ID NO: 168 - protein, 14 aa, synthetic construct
  SITE 1: note (2S)-3-[4-(2-acetamidoethoxy)phenyl]-2-amino-propanoic acid
  SITE 3: note = 4-[(2S)-2-amino-2-carboxy-ethyl]benzoic acid
  SITE 5: note = (2S,4R)-4-aminopyrrolidine-2-carboxylic acid
  SITE 6: note = (2S,3S)-2-amino-3-(1-naphthyl)butanoic acid
  SITE 8: note = D-N-methyl-Alanine
  SITE 10: note (S)-4-(3-(2-Amino-2-carboxyethyl)bicyclo[1.1.1]pentan-1-yl) benzoic acid
  SITE 11: note = (S)-2-amino-5-methoxypentanoic acid
  SITE 12: note = (S)-2-Aminopentanoic acid
  SITE 13: note = (2R,4S)-4-aminopyrrolidine-2-carboxylic acid
  SITE 14: note = (2S,4R)-4-(4-(pyrimidin-5-yl)benzyl) pyrrolidine-2-carboxylic acid
XWFGPXDXGXXXPX

SEQ ID NO: 169 - protein, 14 aa, synthetic construct
  SITE 1: note (2S)-3-[4-(2-acetamidoethoxy)phenyl]-2-amino-propanoic acid
  SITE 3: note = (S)-2-Amino-3-(4-carbamoylphenyl)propanoic acid
  SITE 5: note = (2S,4R)-4-aminopyrrolidine-2-carboxylic acid
  SITE 6: note = (2S,3S)-2-Amino-3-(3-methylnaphthalen-1-yl)butanoic acid
  SITE 7: note = (2S)-2-amino-5-ureido-pentanoic acid
  SITE 8: note = D-N-methyl-Alanine
  SITE 10: note = 4-[4-[(2S)-2-amino-2-carboxy-ethyl]phenyl]benzoic acid
  SITE 11: note = (S)-2-amino-5-methoxypentanoic acid
  SITE 12: note = (S)-2-Aminopentanoic acid
  SITE 13: note = (2R,4S)-4-aminopyrrolidine-2-carboxylic acid
  SITE 14: note = (2S,4R)-4-(4-(pyrimidin-5-yl)benzyl) pyrrolidine-2-carboxylic acid
XWFGPXXXGXXXPX

SEQ ID NO: 170 - protein, 14 aa, synthetic construct
  SITE 1: note (2S)-3-[4-(2-acetamidoethoxy)phenyl]-2-amino-propanoic acid
  SITE 3: note = (S)-2-Amino-3-(4-carbamoylphenyl)propanoic acid
  SITE 5: note = (2S,4R)-4-aminopyrrolidine-2-carboxylic acid
  SITE 6: note = (2S,3S)-2-Amino-3-(3-methylnaphthalen-1-yl)butanoic acid
  SITE 7: note = (2S)-2-amino-5-ureido-pentanoic acid
  SITE 8: note = D-N-methyl-Alanine
  SITE 10: note = 4-[4-[(2S)-2-amino-2-carboxy-ethyl]phenyl]benzoic acid
  SITE 11: note = (S)-2-amino-5-methoxypentanoic acid
  SITE 12: note = (S)-2-Aminopentanoic acid
  SITE 13: note = (2R,4S)-4-hydroxypyrrolidine-2-carboxylic acid
  SITE 14: note = (2S,4R)-4-(4-(pyrimidin-5-yl)benzyl) pyrrolidine-2-carboxylic acid
XWFGPXXXGXXXXX

SEQ ID NO: 171 - protein, 14 aa, synthetic construct
  SITE 1: note (2S)-3-[4-(2-acetamidoethoxy)phenyl]-2-amino-propanoic acid
  SITE 3: note = (S)-2-Amino-3-(4-carbamoylphenyl)propanoic acid
  SITE 5: note = (2S,4R)-4-aminopyrrolidine-2-carboxylic acid
  SITE 6: note = (2S,3S)-2-Amino-3-(3-methylnaphthalen-1-yl)butanoic acid
  SITE 7: note = (2S)-2-amino-5-ureido-pentanoic acid
  SITE 8: note = D-N-methyl-Alanine
  SITE 10: note (S)-2-Amino-3-(4-((1s,4R)-4-(tert-butoxycarbonyl)cyclohexyl )phenyl)propanoic acid
  SITE 11: note = (S)-2-amino-5-methoxypentanoic acid
  SITE 12: note = (S)-2-Aminopentanoic acid
  SITE 13: note = (2R,4S)-4-hydroxypyrrolidine-2-carboxylic acid
  SITE 14: note = (2S,4R)-4-(4-(pyrimidin-5-yl)benzyl) pyrrolidine-2-carboxylic acid
XWFGPXXXGXXXXX

SEQ ID NO: 172 - protein, 14 aa, synthetic construct
  SITE 1: note (2S)-3-[4-(2-acetamidoethoxy)phenyl]-2-amino-propanoic acid
  SITE 3: note = (S)-2-Amino-3-(4-carbamoylphenyl)propanoic acid
  SITE 5: note = (2S,4R)-4-aminopyrrolidine-2-carboxylic acid
  SITE 6: note = (2S,3S)-2-Amino-3-(3-methylnaphthalen-1-yl)butanoic acid
  SITE 7: note = (2S)-2-amino-5-ureido-pentanoic acid
  SITE 8: note = D-N-methyl-Alanine
  SITE 10: note (S)-2-Amino-3-(4-((1r,4S)-4-(tert-butoxycarbonyl)cyclohexyl )phenyl)propanoic acid
  SITE 11: note = (S)-2-amino-5-methoxypentanoic acid
  SITE 12: note = (S)-2-Aminopentanoic acid
  SITE 13: note = (2R,4S)-4-hydroxypyrrolidine-2-carboxylic acid
  SITE 14: note = (2S,4R)-4-(4-(pyrimidin-5-yl)benzyl) pyrrolidine-2-carboxylic acid
XWFGPXXXGXXXXX

SEQ ID NO: 173 - protein, 14 aa, synthetic construct
  SITE 1: note (2S)-3-[4-(2-acetamidoethoxy)phenyl]-2-amino-propanoic acid
  SITE 3: note = (S)-2-Amino-3-(4-carbamoylphenyl)propanoic acid
  SITE 5: note = (2S,4R)-4-aminopyrrolidine-2-carboxylic acid
  SITE 6: note = (2S,3S)-2-Amino-3-(3-methylnaphthalen-1-yl)butanoic acid
  SITE 7: note = (2S)-2-amino-5-ureido-pentanoic acid
  SITE 8: note = D-N-methyl-Alanine
  SITE 10: note = 4-[4-[(2S)-2-amino-2-carboxy-ethyl]phenyl]benzoic acid
  SITE 11: note (S)-21-Amino-21-carboxy-N,N,N-trimethyl-15-oxo-3,6,9,12-tet raoxa-16-azahenicosan-1-aminium
  SITE 12: note = (S)-2-Aminopentanoic acid
  SITE 13: note = (2R,4S)-4-hydroxypyrrolidine-2-carboxylic acid
  SITE 14: note = (2S,4R)-4-(4-(pyrimidin-5-yl)benzyl) pyrrolidine-2-carboxylic acid
XWFGPXXXGXXXXX

SEQ ID NO: 174 - protein, 14 aa, synthetic construct
  SITE 1: note (2S)-3-[4-(2-acetamidoethoxy)phenyl]-2-amino-propanoic acid
  SITE 3: note = (S)-2-Amino-3-(4-carbamoylphenyl)propanoic acid
  SITE 5: note = (2S,4R)-4-aminopyrrolidine-2-carboxylic acid
  SITE 6: note = (2S,3S)-2-Amino-3-(3-methylnaphthalen-1-yl)butanoic acid
  SITE 7: note = (2S)-2-amino-5-ureido-pentanoic acid
  SITE 8: note = D-N-methyl-Alanine
  SITE 10: note = 4-[4-[(2S)-2-amino-2-carboxy-ethyl]phenyl]benzoic acid
  SITE 11: note (S)-21-Amino-21-carboxy-N,N,N-trimethyl-15-oxo-3,6,9,12-tet raoxa-16-azahenicosan-1-aminium
  SITE 13: note = (2R,4S)-4-hydroxypyrrolidine-2-carboxylic acid
  SITE 14: note = (2S,4R)-4-(4-(pyrimidin-5-yl)benzyl) pyrrolidine-2-carboxylic acid
XWFGPXXXGXXAXX

SEQ ID NO: 175 - protein, 14 aa, synthetic construct
  SITE 1: note (2S)-3-[4-(2-acetamidoethoxy)phenyl]-2-amino-propanoic acid
  SITE 3: note = (S)-2-Amino-3-(4-carbamoylphenyl)propanoic acid
  SITE 5: note = (2S,4R)-4-aminopyrrolidine-2-carboxylic acid
  SITE 6: note = (2S,3S)-2-Amino-3-(3-methylnaphthalen-1-yl)butanoic acid
  SITE 7: note = (2S)-2-amino-5-ureido-pentanoic acid
  SITE 8: note = D-N-methyl-Alanine
  SITE 10: note = 4-[4-[(2S)-2-amino-2-carboxy-ethyl]phenyl]benzoic acid
  SITE 11: note = (S)-2-amino-5-methoxypentanoic acid
  SITE 12: note (S)-21-Amino-21-carboxy-N,N,N-trimethyl-15-oxo-3,6,9,12-tet raoxa-16-azahenicosan-1-aminium
  SITE 13: note = (2R,4S)-4-hydroxypyrrolidine-2-carboxylic acid
  SITE 14: note = (2S,4R)-4-(4-(pyrimidin-5-yl)benzyl) pyrrolidine-2-carboxylic acid
XWFGPXXXGXXXXX

SEQ ID NO: 176 - protein, 14 aa, synthetic construct
  SITE 1: note (2S)-3-[4-(2-acetamidoethoxy)phenyl]-2-amino-propanoic acid
  SITE 3: note = (S)-2-Amino-3-(4-carbamoylphenyl)propanoic acid
  SITE 5: note = (2S,4R)-4-aminopyrrolidine-2-carboxylic acid
  SITE 6: note = (2S,3S)-2-Amino-3-(3-methylnaphthalen-1-yl)butanoic acid
  SITE 7: note = (2S)-2-amino-5-ureido-pentanoic acid
  SITE 8: note = D-N-methyl-Alanine
  SITE 10: note = 4-[4-[(2S)-2-amino-2-carboxy-ethyl]phenyl]benzoic acid
  SITE 12: note (S)-21-Amino-21-carboxy-N,N,N-trimethyl-15-oxo-3,6,9,12-tet raoxa-16-azahenicosan-1-aminium
  SITE 13: note = (2R,4S)-4-hydroxypyrrolidine-2-carboxylic acid
  SITE 14: note = (2S,4R)-4-(4-(pyrimidin-5-yl)benzyl) pyrrolidine-2-carboxylic acid
XWFGPXXXGXAXXX

SEQ ID NO: 177 - protein, 14 aa, synthetic construct
  SITE 1: note (2S)-3-[4-(2-acetamidoethoxy)phenyl]-2-amino-propanoic acid
  SITE 3: note = (S)-2-Amino-3-(4-carbamoylphenyl)propanoic acid
  SITE 5: note = (2S,4R)-4-aminopyrrolidine-2-carboxylic acid
  SITE 6: note = (2S,3S)-2-Amino-3-(3-methylnaphthalen-1-yl)butanoic acid
  SITE 7: note = (2S)-2-amino-5-ureido-pentanoic acid
  SITE 8: note = D-N-methyl-Alanine
  SITE 10: note = 4-[4-[(2S)-2-amino-2-carboxy-ethyl]phenyl]benzoic acid
  SITE 11: note = (S)-4-Amino-4-carboxy-N,N,N-trimethylbutan-1-aminium
  SITE 13: note = (2R,4S)-4-hydroxypyrrolidine-2-carboxylic acid
  SITE 14: note = (2S,4R)-4-(4-(pyrimidin-5-yl)benzyl) pyrrolidine-2-carboxylic acid
XWFGPXXXGXXAXX

SEQ ID NO: 178 - protein, 14 aa, synthetic construct
  SITE 1: note (2S)-3-[4-(2-acetamidoethoxy)phenyl]-2-amino-propanoic acid
  SITE 3: note = (S)-2-Amino-3-(4-carbamoylphenyl)propanoic acid
  SITE 5: note = (2S,4R)-4-aminopyrrolidine-2-carboxylic acid
  SITE 6: note = (2S,3S)-2-Amino-3-(3-methylnaphthalen-1-yl)butanoic acid
  SITE 7: note = (2S)-2-amino-5-ureido-pentanoic acid
  SITE 8: note = D-N-methyl-Alanine
  SITE 10: note = 4-[4-[(2S)-2-amino-2-carboxy-ethyl]phenyl]benzoic acid
  SITE 12: note = (S)-4-Amino-4-carboxy-N,N,N-trimethylbutan-1-aminium
  SITE 13: note = (2R,4S)-4-hydroxypyrrolidine-2-carboxylic acid
  SITE 14: note = (2S,4R)-4-(4-(pyrimidin-5-yl)benzyl) pyrrolidine-2-carboxylic acid
XWFGPXXXGXAXXX

SEQ ID NO: 179 - protein, 14 aa, synthetic construct
  SITE 1: note (2S)-3-[4-(2-acetamidoethoxy)phenyl]-2-amino-propanoic acid
  SITE 3: note = (S)-2-Amino-3-(4-carbamoylphenyl)propanoic acid
  SITE 5: note = (2S,4R)-4-aminopyrrolidine-2-carboxylic acid
  SITE 6: note = (2S,3S)-2-Amino-3-(3-methylnaphthalen-1-yl)butanoic acid
  SITE 7: note = (2S)-2-amino-5-ureido-pentanoic acid
  SITE 8: note = (R)-piperidine-2-carboxylic acid
  SITE 10: note = 4-[4-[(2S)-2-amino-2-carboxy-ethyl]phenyl]benzoic acid
  SITE 11: note = (S)-4-Amino-4-carboxy-N,N,N-trimethylbutan-1-aminium
  SITE 13: note = (2R,4S)-4-hydroxypyrrolidine-2-carboxylic acid
  SITE 14: note = (2S,4R)-4-(4-(pyrimidin-5-yl)benzyl) pyrrolidine-2-carboxylic acid
XWFGPXXXGXXAXX

SEQ ID NO: 180 - protein, 14 aa, synthetic construct
  SITE 1: note (2S)-3-[4-(2-acetamidoethoxy)phenyl]-2-amino-propanoic acid
  SITE 3: note = (S)-2-Amino-3-(4-carbamoylphenyl)propanoic acid
  SITE 5: note = (2S,4R)-4-aminopyrrolidine-2-carboxylic acid
  SITE 6: note = (2S,3S)-2-Amino-3-(3-chloronaphthalen-1-yl)butanoic acid
  SITE 7: note = N4,N4-dimethyl-L-asparagine
  SITE 8: note = (R)-piperidine-2-carboxylic acid
  SITE 10: note = 4-[4-[(2S)-2-amino-2-carboxy-ethyl]phenyl]benzoic acid
  SITE 11: note (S)-21-Amino-21-carboxy-N,N,N-trimethyl-15-oxo-3,6,9,12-tet raoxa-16-azahenicosan-1-aminium
  SITE 12: note = (S)-2-Aminopentanoic acid
  SITE 13: note = (2R,4S)-4-hydroxypyrrolidine-2-carboxylic acid
  SITE 14: note = (2S,4R)-4-(4-(pyrimidin-5-yl)benzyl) pyrrolidine-2-carboxylic acid
XWFGPXXXGXXXXX

SEQ ID NO: 181 - protein, 14 aa, synthetic construct
  SITE 1: note (2S)-3-[4-(2-acetamidoethoxy)phenyl]-2-amino-propanoic acid
  SITE 3: note = (S)-2-Amino-3-(4-carbamoylphenyl)propanoic acid
  SITE 5: note = (2S,4R)-4-aminopyrrolidine-2-carboxylic acid
  SITE 6: note = (2S,3S)-2-Amino-3-(3-chloronaphthalen-1-yl)butanoic acid
  SITE 7: note = (2S)-2-amino-5-ureido-pentanoic acid
  SITE 8: note = D-N-methyl-Alanine
  SITE 10: note = 4-[4-[(2S)-2-amino-2-carboxy-ethyl]phenyl]benzoic acid
  SITE 12: note = (S)-4-Amino-4-carboxy-N,N,N-trimethylbutan-1-aminium
  SITE 13: note = (2R,4S)-4-hydroxypyrrolidine-2-carboxylic acid
  SITE 14: note = (2S,4R)-4-(4-(pyrimidin-5-yl)benzyl) pyrrolidine-2-carboxylic acid
XWFGPXXXGXAXXX

SEQ ID NO: 182 - protein, 14 aa, synthetic construct
  SITE 1: note (2S)-3-[4-(2-acetamidoethoxy)phenyl]-2-amino-propanoic acid
  SITE 3: note = (S)-2-Amino-3-(4-carbamoylphenyl)propanoic acid
  SITE 5: note = (2S,4R)-4-aminopyrrolidine-2-carboxylic acid
  SITE 6: note = (2S,3S)-2-Amino-3-(3-chloronaphthalen-1-yl)butanoic acid
  SITE 7: note = (2S)-2-amino-5-ureido-pentanoic acid
  SITE 8: note = D-N-methyl-Alanine
  SITE 10: note = 4-[4-[(2S)-2-amino-2-carboxy-ethyl]phenyl]benzoic acid
  SITE 11: note = (S)-4-Amino-4-carboxy-N,N,N-trimethylbutan-1-aminium
  SITE 13: note = (2R,4S)-4-hydroxypyrrolidine-2-carboxylic acid
  SITE 14: note = (2S,4R)-4-(4-(pyrimidin-5-yl)benzyl) pyrrolidine-2-carboxylic acid
XWFGPXXXGXXAXX

SEQ ID NO: 183 - protein, 14 aa, synthetic construct
  SITE 1: note (2S)-3-[4-(2-acetamidoethoxy)phenyl]-2-amino-propanoic acid
  SITE 3: note = (S)-2-Amino-3-(4-carbamoylphenyl)propanoic acid
  SITE 5: note = (2S,4R)-4-aminopyrrolidine-2-carboxylic acid
  SITE 6: note = (2S,3S)-2-Amino-3-(3-chloronaphthalen-1-yl)butanoic acid
  SITE 7: note = N4,N4-dimethyl-L-asparagine
  SITE 8: note = D-N-methyl-Alanine
  SITE 10: note = 4-[4-[(2S)-2-amino-2-carboxy-ethyl]phenyl]benzoic acid
  SITE 11: note = (S)-4-Amino-4-carboxy-N,N,N-trimethylbutan-1-aminium
  SITE 13: note = (2R,4S)-4-hydroxypyrrolidine-2-carboxylic acid
  SITE 14: note = (2S,4R)-4-(4-(pyrimidin-5-yl)benzyl) pyrrolidine-2-carboxylic acid
XWFGPXXXGXXAXX

SEQ ID NO: 184 - protein, 14 aa, synthetic construct
  SITE 1: note (2S)-3-[4-(2-acetamidoethoxy)phenyl]-2-amino-propanoic acid
  SITE 3: note = (S)-2-Amino-3-(4-carbamoylphenyl)propanoic acid
  SITE 5: note = (2S,4R)-4-aminopyrrolidine-2-carboxylic acid
  SITE 6: note = (2S,3S)-2-Amino-3-(3-chloronaphthalen-1-yl)butanoic acid
  SITE 7: note = (2S)-2-amino-5-ureido-pentanoic acid
  SITE 8: note = D-N-methyl-Alanine
  SITE 10: note = 4-[4-[(2S)-2-amino-2-carboxy-ethyl]phenyl]benzoic acid
  SITE 12: note (S)-21-Amino-21-carboxy-N,N,N-trimethyl-15-oxo-3,6,9,12-tet raoxa-16-azahenicosan-1-aminium
  SITE 13: note = (2R,4S)-4-hydroxypyrrolidine-2-carboxylic acid
  SITE 14: note = (2S,4R)-4-(4-(pyrimidin-5-yl)benzyl) pyrrolidine-2-carboxylic acid
XWFGPXXXGXAXXX

SEQ ID NO: 185 - protein, 14 aa, synthetic construct
  SITE 1: note (2S)-3-[4-(2-acetamidoethoxy)phenyl]-2-amino-propanoic acid
  SITE 3: note = (S)-2-Amino-3-(4-carbamoylphenyl)propanoic acid
  SITE 5: note = (2S,4R)-4-aminopyrrolidine-2-carboxylic acid
  SITE 6: note = (2S,3S)-2-Amino-3-(3-chloronaphthalen-1-yl)butanoic acid
  SITE 7: note = N4,N4-dimethyl-L-asparagine
  SITE 8: note = D-N-methyl-Alanine
  SITE 10: note = 4-[4-[(2S)-2-amino-2-carboxy-ethyl]phenyl]benzoic acid
  SITE 12: note (S)-21-Amino-21-carboxy-N,N,N-trimethyl-15-oxo-3,6,9,12-tet raoxa-16-azahenicosan-1-aminium
  SITE 13: note = (2R,4S)-4-hydroxypyrrolidine-2-carboxylic acid
  SITE 14: note = (2S,4R)-4-(4-(pyrimidin-5-yl)benzyl) pyrrolidine-2-carboxylic acid
XWFGPXXXGXAXXX

SEQ ID NO: 186 - protein, 14 aa, synthetic construct
  SITE 1: note (2S)-3-[4-(2-acetamidoethoxy)phenyl]-2-amino-propanoic acid
  SITE 3: note = (S)-2-Amino-3-(4-carbamoylphenyl)propanoic acid
  SITE 5: note = (2S,4R)-4-aminopyrrolidine-2-carboxylic acid
  SITE 6: note = (2S,3S)-2-Amino-3-(3-chloronaphthalen-1-yl)butanoic acid
  SITE 7: note = (2S)-2-amino-5-ureido-pentanoic acid
  SITE 8: note = D-N-methyl-Alanine
  SITE 10: note = 4-[4-[(2S)-2-amino-2-carboxy-ethyl]phenyl]benzoic acid
  SITE 11: note = (S)-2-amino-5-methoxypentanoic acid
  SITE 12: note (S)-21-Amino-21-carboxy-N,N,N-trimethyl-15-oxo-3,6,9,12-tet raoxa-16-azahenicosan-1-aminium
  SITE 13: note = (2R,4S)-4-hydroxypyrrolidine-2-carboxylic acid
  SITE 14: note = (2S,4R)-4-(4-(pyrimidin-5-yl)benzyl) pyrrolidine-2-carboxylic acid
XWFGPXXXGXXXXX

SEQ ID NO: 187 - protein, 14 aa, synthetic construct
  SITE 1: note (2S)-3-[4-(2-acetamidoethoxy)phenyl]-2-amino-propanoic acid
  SITE 3: note = (S)-2-Amino-3-(4-carbamoylphenyl)propanoic acid
  SITE 5: note = (2S,4R)-4-aminopyrrolidine-2-carboxylic acid
  SITE 6: note = (2S,3S)-2-Amino-3-(3-chloronaphthalen-1-yl)butanoic acid
  SITE 7: note = N4,N4-dimethyl-L-asparagine
  SITE 8: note = D-N-methyl-Alanine
  SITE 10: note = 4-[4-[(2S)-2-amino-2-carboxy-ethyl]phenyl]benzoic acid
  SITE 11: note = (S)-2-amino-5-methoxypentanoic acid
  SITE 12: note (S)-21-Amino-21-carboxy-N,N,N-trimethyl-15-oxo-3,6,9,12-tet raoxa-16-azahenicosan-1-aminium
  SITE 13: note = (2R,4S)-4-hydroxypyrrolidine-2-carboxylic acid
  SITE 14: note = (2S,4R)-4-(4-(pyrimidin-5-yl)benzyl) pyrrolidine-2-carboxylic acid
XWFGPXXXGXXXXX

SEQ ID NO: 188 - protein, 14 aa, synthetic construct
  SITE 1: note (2S)-3-[4-(2-acetamidoethoxy)phenyl]-2-amino-propanoic acid
  SITE 3: note = (S)-2-Amino-3-(4-carbamoylphenyl)propanoic acid
  SITE 5: note = (2S,4R)-4-aminopyrrolidine-2-carboxylic acid
  SITE 6: note = (2S,3S)-2-Amino-3-(3-chloronaphthalen-1-yl)butanoic acid
  SITE 7: note = (2S)-2-amino-5-ureido-pentanoic acid
  SITE 8: note = D-N-methyl-Alanine
  SITE 10: note = 4-[4-[(2S)-2-amino-2-carboxy-ethyl]phenyl]benzoic acid
  SITE 11: note (S)-21-Amino-21-carboxy-N,N,N-trimethyl-15-oxo-3,6,9,12-tet raoxa-16-azahenicosan-1-aminium
  SITE 13: note = (2R,4S)-4-hydroxypyrrolidine-2-carboxylic acid
  SITE 14: note = (2S,4R)-4-(4-(pyrimidin-5-yl)benzyl) pyrrolidine-2-carboxylic acid
XWFGPXXXGXXAXX

SEQ ID NO: 189 - protein, 14 aa, synthetic construct
  SITE 1: note (2S)-3-[4-(2-acetamidoethoxy)phenyl]-2-amino-propanoic acid
  SITE 3: note = (S)-2-Amino-3-(4-carbamoylphenyl)propanoic acid
  SITE 5: note = (2S,4R)-4-aminopyrrolidine-2-carboxylic acid
  SITE 6: note = (2S,3S)-2-Amino-3-(3-chloronaphthalen-1-yl)butanoic acid
  SITE 7: note = N4,N4-dimethyl-L-asparagine
  SITE 8: note = D-N-methyl-Alanine
  SITE 10: note = 4-[4-[(2S)-2-amino-2-carboxy-ethyl]phenyl]benzoic acid
  SITE 11: note (S)-21-Amino-21-carboxy-N,N,N-trimethyl-15-oxo-3,6,9,12-tet raoxa-16-azahenicosan-1-aminium
  SITE 13: note = (2R,4S)-4-hydroxypyrrolidine-2-carboxylic acid
  SITE 14: note = (2S,4R)-4-(4-(pyrimidin-5-yl)benzyl) pyrrolidine-2-carboxylic acid
XWFGPXXXGXXAXX

SEQ ID NO: 190 - protein, 14 aa, synthetic construct
  SITE 1: note (2S)-3-[4-(2-acetamidoethoxy)phenyl]-2-amino-propanoic acid
  SITE 3: note = (S)-2-Amino-3-(4-carbamoylphenyl)propanoic acid
  SITE 5: note = (2S,4R)-4-aminopyrrolidine-2-carboxylic acid
  SITE 6: note = (2S,3S)-2-Amino-3-(3-chloronaphthalen-1-yl)butanoic acid
  SITE 7: note = (2S)-2-amino-5-ureido-pentanoic acid
  SITE 8: note = D-N-methyl-Alanine
  SITE 10: note = 4-[4-[(2S)-2-amino-2-carboxy-ethyl]phenyl]benzoic acid
  SITE 11: note (S)-21-Amino-21-carboxy-N,N,N-trimethyl-15-oxo-3,6,9,12-tet raoxa-16-azahenicosan-1-aminium
  SITE 12: note = (S)-2-Aminopentanoic acid
  SITE 13: note = (2R,4S)-4-hydroxypyrrolidine-2-carboxylic acid
  SITE 14: note = (2S,4R)-4-(4-(pyrimidin-5-yl)benzyl) pyrrolidine-2-carboxylic acid
XWFGPXXXGXXXXX

SEQ ID NO: 191 - protein, 14 aa, synthetic construct
  SITE 1: note (2S)-3-[4-(2-acetamidoethoxy)phenyl]-2-amino-propanoic acid
  SITE 3: note = (S)-2-Amino-3-(4-carbamoylphenyl)propanoic acid
  SITE 5: note = (2S,4R)-4-aminopyrrolidine-2-carboxylic acid
  SITE 6: note = (2S,3S)-2-Amino-3-(3-chloronaphthalen-1-yl)butanoic acid
  SITE 7: note = N4,N4-dimethyl-L-asparagine
  SITE 8: note = D-N-methyl-Alanine
  SITE 10: note = 4-[4-[(2S)-2-amino-2-carboxy-ethyl]phenyl]benzoic acid
  SITE 11: note (S)-21-Amino-21-carboxy-N,N,N-trimethyl-15-oxo-3,6,9,12-tet raoxa-16-azahenicosan-1-aminium
  SITE 12: note = (S)-2-Aminopentanoic acid
  SITE 13: note = (2R,4S)-4-hydroxypyrrolidine-2-carboxylic acid
  SITE 14: note = (2S,4R)-4-(4-(pyrimidin-5-yl)benzyl) pyrrolidine-2-carboxylic acid
XWFGPXXXGXXXXX

SEQ ID NO: 192 - protein, 14 aa, synthetic construct
  SITE 1: note (2S)-3-[4-(2-acetamidoethoxy)phenyl]-2-amino-propanoic acid
  SITE 3: note = (S)-2-Amino-3-(4-carbamoylphenyl)propanoic acid
  SITE 5: note = (2S,4R)-4-aminopyrrolidine-2-carboxylic acid
  SITE 6: note = (2S,3S)-2-Amino-3-(3-chloronaphthalen-1-yl)butanoic acid
  SITE 7: note = N4,N4-dimethyl-L-asparagine
  SITE 8: note = D-N-methyl-Alanine
  SITE 10: note (S)-2-Amino-3-(4-((1r,4S)-4-(tert-butoxycarbonyl)cyclohexyl )phenyl)propanoic acid
  SITE 11: note = (S)-2-amino-5-methoxypentanoic acid
  SITE 12: note = (S)-2-Aminopentanoic acid
  SITE 13: note = (2R,4S)-4-hydroxypyrrolidine-2-carboxylic acid
  SITE 14: note = (2S,4R)-4-(4-(pyrimidin-5-yl)benzyl) pyrrolidine-2-carboxylic acid
XWFGPXXXGXXXXX

SEQ ID NO: 193 - protein, 14 aa, synthetic construct
  SITE 1: note (2S)-3-[4-(2-acetamidoethoxy)phenyl]-2-amino-propanoic acid
  SITE 3: note = (S)-2-Amino-3-(4-carbamoylphenyl)propanoic acid
  SITE 5: note = (2S,4R)-4-aminopyrrolidine-2-carboxylic acid
  SITE 6: note = (2S,3S)-2-Amino-3-(3-chloronaphthalen-1-yl)butanoic acid
  SITE 7: note = N4,N4-dimethyl-L-asparagine
  SITE 8: note = D-N-methyl-Alanine
  SITE 10: note (S)-2-Amino-3-(4-((1s,4R)-4-(tert-butoxycarbonyl)cyclohexyl )phenyl)propanoic acid
  SITE 11: note = (S)-2-amino-5-methoxypentanoic acid
  SITE 12: note = (S)-2-Aminopentanoic acid
  SITE 13: note = (2R,4S)-4-hydroxypyrrolidine-2-carboxylic acid
  SITE 14: note = (2S,4R)-4-(4-(pyrimidin-5-yl)benzyl) pyrrolidine-2-carboxylic acid
XWFGPXXXGXXXXX

SEQ ID NO: 194 - protein, 14 aa, synthetic construct
  SITE 1: note (2S)-3-[4-(2-acetamidoethoxy)phenyl]-2-amino-propanoic acid
  SITE 3: note = (S)-2-Amino-3-(4-carbamoylphenyl)propanoic acid
  SITE 5: note = (2S,4R)-4-aminopyrrolidine-2-carboxylic acid
  SITE 6: note = (2S,3S)-2-Amino-3-(3-chloronaphthalen-1-yl)butanoic acid
  SITE 7: note = (2S)-2-amino-5-ureido-pentanoic acid
  SITE 8: note = D-N-methyl-Alanine
  SITE 10: note = 4-[4-[(2S)-2-amino-2-carboxy-ethyl]phenyl]benzoic acid
  SITE 11: note = (S)-2-amino-5-methoxypentanoic acid
  SITE 12: note = (S)-2-Aminopentanoic acid
  SITE 13: note = (2R,4S)-4-hydroxypyrrolidine-2-carboxylic acid
  SITE 14: note = (2S,4R)-4-(4-(pyrimidin-5-yl)benzyl) pyrrolidine-2-carboxylic acid
XWFGPXXXGXXXXX

SEQ ID NO: 195 - protein, 14 aa, synthetic construct
  SITE 1: note (2S)-3-[4-(2-acetamidoethoxy)phenyl]-2-amino-propanoic acid
  SITE 3: note = (S)-2-Amino-3-(4-carbamoylphenyl)propanoic acid
  SITE 5: note = (2S,4R)-4-aminopyrrolidine-2-carboxylic acid
  SITE 6: note = (2S,3S)-2-Amino-3-(3-chloronaphthalen-1-yl)butanoic acid
  SITE 7: note = N4,N4-dimethyl-L-asparagine
  SITE 8: note = D-N-methyl-Alanine
  SITE 10: note = 4-[4-[(2S)-2-amino-2-carboxy-ethyl]phenyl]benzoic acid
  SITE 11: note = (S)-2-amino-5-methoxypentanoic acid
  SITE 12: note = (S)-2-Aminopentanoic acid
  SITE 13: note = (2R,4S)-4-hydroxypyrrolidine-2-carboxylic acid
  SITE 14: note = (2S,4R)-4-(4-(pyrimidin-5-yl)benzyl) pyrrolidine-2-carboxylic acid
XWFGPXXXGXXXXX

SEQ ID NO: 196 - protein, 14 aa, synthetic construct
  SITE 1: note (2S)-3-[4-(2-acetamidoethoxy)phenyl]-2-amino-propanoic acid
  SITE 3: note = (S)-2-Amino-3-(4-carbamoylphenyl)propanoic acid
  SITE 5: note = (2S,4R)-4-aminopyrrolidine-2-carboxylic acid
  SITE 6: note = (2S,3S)-2-amino-3-(1-naphthyl)butanoic acid
  SITE 7: note = (2S)-2-amino-5-ureido-pentanoic acid
  SITE 8: note = D-N-methyl-Alanine
  SITE 10: note = 4-[4-[(2S)-2-amino-2-carboxy-ethyl]phenyl]benzoic acid
  SITE 11: note = (S)-2-amino-5-methoxypentanoic acid
  SITE 12: note = (S)-2-Aminopentanoic acid
  SITE 13: note = (2R,4S)-4-hydroxypyrrolidine-2-carboxylic acid
  SITE 14: note = (2S,4R)-4-(4-(pyrimidin-5-yl)benzyl) pyrrolidine-2-carboxylic acid
XWFGPXXXGXXXXX

SEQ ID NO: 197 - protein, 14 aa, synthetic construct
  SITE 1: note (2S)-3-[4-(2-acetamidoethoxy)phenyl]-2-amino-propanoic acid
  SITE 3: note = (S)-2-Amino-3-(4-carbamoylphenyl)propanoic acid
  SITE 5: note = (2S,4R)-4-aminopyrrolidine-2-carboxylic acid
  SITE 6: note = (2S,3S)-2-amino-3-(1-naphthyl)butanoic acid
  SITE 7: note = N4,N4-dimethyl-L-asparagine
  SITE 8: note = D-N-methyl-Alanine
  SITE 10: note = 4-[4-[(2S)-2-amino-2-carboxy-ethyl]phenyl]benzoic acid
  SITE 11: note = (S)-2-amino-5-methoxypentanoic acid
  SITE 12: note = (S)-2-Aminopentanoic acid
  SITE 13: note = (2R,4S)-4-hydroxypyrrolidine-2-carboxylic acid
  SITE 14: note = (2S,4R)-4-(4-(pyrimidin-5-yl)benzyl) pyrrolidine-2-carboxylic acid
XWFGPXXXGXXXXX

SEQ ID NO: 198 - protein, 14 aa, synthetic construct
  SITE 1: note (2S)-3-[4-(2-acetamidoethoxy)phenyl]-2-amino-propanoic acid
  SITE 3: note (S)-2-Amino-3-(4-(5-oxo-4,5-dihydro-1,2,4-oxadiazol-3-yl)ph enyl)propanoic acid
  SITE 5: note = (2S,4R)-4-aminopyrrolidine-2-carboxylic acid
  SITE 6: note = (2S,3S)-2-amino-3-(1-naphthyl)butanoic acid
  SITE 7: note = N4,N4-dimethyl-L-asparagine
  SITE 8: note = D-N-methyl-Alanine
  SITE 10: note (S)-2-Amino-3-(4'-carbamoyl-[1,1'-biphenyl]-4-yl)propanoic acid
  SITE 11: note = (S)-2-amino-5-methoxypentanoic acid
  SITE 12: note = (S)-2-Aminopentanoic acid
  SITE 13: note = (2R,4S)-4-hydroxypyrrolidine-2-carboxylic acid
  SITE 14: note = (2S,4R)-4-(4-(pyrimidin-5-yl)benzyl) pyrrolidine-2-carboxylic acid
XWXGPXXXGXXXXX

SEQ ID NO: 199 - protein, 14 aa, synthetic construct
  SITE 1: note (2S)-3-[4-(2-acetamidoethoxy)phenyl]-2-amino-propanoic acid
  SITE 3: note (S)-2-Amino-3-(4-(5-oxo-4,5-dihydro-1,2,4-oxadiazol-3-yl)ph enyl)propanoic acid
  SITE 5: note = (2S,4R)-4-aminopyrrolidine-2-carboxylic acid
  SITE 6: note = (2S,3S)-2-amino-3-(1-naphthyl)butanoic acid
  SITE 7: note = (2S)-2-amino-5-ureido-pentanoic acid
  SITE 8: note = D-N-methyl-Alanine
  SITE 10: note (S)-2-Amino-3-(4'-carbamoyl-[1,1'-biphenyl]-4-yl)propanoic acid
  SITE 11: note = (S)-2-amino-5-methoxypentanoic acid
  SITE 12: note = (S)-2-Aminopentanoic acid
  SITE 13: note = (2R,4S)-4-hydroxypyrrolidine-2-carboxylic acid
  SITE 14: note = (2S,4R)-4-(4-(pyrimidin-5-yl)benzyl) pyrrolidine-2-carboxylic acid
XWXGPXXXGXXXXX

SEQ ID NO: 200 - protein, 14 aa, synthetic construct
  SITE 1: note (2S)-3-[4-(2-acetamidoethoxy)phenyl]-2-amino-propanoic acid
  SITE 3: note = (S)-2-Amino-3-(4-carbamoylphenyl)propanoic acid
  SITE 5: note = (2S,4R)-4-aminopyrrolidine-2-carboxylic acid
  SITE 6: note = (2S,3S)-2-Amino-3-(3-chloronaphthalen-1-yl)butanoic acid
  SITE 7: note = N4,N4-dimethyl-L-asparagine
  SITE 8: note = D-N-methyl-Alanine
  SITE 10: note = 4-[4-[(2S)-2-amino-2-carboxy-ethyl]phenyl]benzoic acid
  SITE 12: note = (S)-4-Amino-4-carboxy-N,N,N-trimethylbutan-1-aminium
  SITE 13: note = (2R,4S)-4-hydroxypyrrolidine-2-carboxylic acid
  SITE 14: note = (2S,4R)-4-(4-(pyrimidin-5-yl)benzyl) pyrrolidine-2-carboxylic acid
XWFGPXXXGXAXXX

SEQ ID NO: 201 - protein, 14 aa, synthetic construct
  SITE 1: note (2S)-3-[4-(2-acetamidoethoxy)phenyl]-2-amino-propanoic acid
  SITE 3: note = (S)-2-Amino-3-(4-carbamoylphenyl)propanoic acid
  SITE 5: note = (2S,4R)-4-aminopyrrolidine-2-carboxylic acid
  SITE 6: note = (2S,3S)-2-Amino-3-(3-methoxynaphthalen-1-yl)butanoic acid
  SITE 7: note = (2S)-2-amino-5-ureido-pentanoic acid
  SITE 8: note = D-N-methyl-Alanine
  SITE 10: note = 4-[4-[(2S)-2-amino-2-carboxy-ethyl]phenyl]benzoic acid
  SITE 11: note = (S)-2-amino-5-methoxypentanoic acid
  SITE 12: note = (S)-2-Aminopentanoic acid
  SITE 13: note = (2R,4S)-4-hydroxypyrrolidine-2-carboxylic acid
  SITE 14: note = (2S,4R)-4-(4-(pyrimidin-5-yl)benzyl) pyrrolidine-2-carboxylic acid
XWFGPXXXGXXXXX

SEQ ID NO: 202 - protein, 14 aa, synthetic construct
  SITE 1: note (2S)-3-[4-(2-acetamidoethoxy)phenyl]-2-amino-propanoic acid
  SITE 3: note = (S)-2-Amino-3-(4-carbamoylphenyl)propanoic acid
  SITE 5: note = (2S,4R)-4-aminopyrrolidine-2-carboxylic acid
  SITE 6: note = (2S,3S)-2-Amino-3-(3-methoxynaphthalen-1-yl)butanoic acid
  SITE 7: note = (2S)-2-amino-5-ureido-pentanoic acid
  SITE 8: note = D-N-methyl-Alanine
  SITE 10: note = 4-[4-[(2S)-2-amino-2-carboxy-ethyl]phenyl]benzoic acid
  SITE 11: note = (S)-2-amino-5-methoxypentanoic acid
  SITE 12: note = (S)-2-Aminopentanoic acid
  SITE 13: note = (2R,4S)-4-hydroxypyrrolidine-2-carboxylic acid
  SITE 14: note = (2S,4R)-4-(4-(pyrimidin-5-yl)benzyl) pyrrolidine-2-carboxylic acid
XWFGPXXXGXXXXX

SEQ ID NO: 203 - protein, 14 aa, synthetic construct
  SITE 1: note (2S)-3-[4-(2-acetamidoethoxy)phenyl]-2-amino-propanoic acid
  SITE 3: note = 4-[(2S)-2-amino-2-carboxy-ethyl]benzoic acid
  SITE 5: note = (2S,4R)-4-aminopyrrolidine-2-carboxylic acid
  SITE 6: note = (2S,3S)-2-Amino-3-(3-methylnaphthalen-1-yl)butanoic acid
  SITE 8: note = D-N-methyl-Alanine
  SITE 10: note = 4-[4-[(2S)-2-amino-2-carboxy-ethyl]phenyl]benzoic acid
  SITE 11: note = (S)-2-amino-5-methoxypentanoic acid
  SITE 13: note = (2R,4S)-4-aminopyrrolidine-2-carboxylic acid
XWFGPXDXGXXAPP

SEQ ID NO: 204 - protein, 14 aa, synthetic construct
  SITE 1: note (2S)-3-[4-(2-acetamidoethoxy)phenyl]-2-amino-propanoic acid
  SITE 3: note (S)-2-Amino-3-(4-(5-oxo-4,5-dihydro-1,2,4-oxadiazol-3-yl)ph enyl)propanoic acid
  SITE 5: note = (2S,4R)-4-aminopyrrolidine-2-carboxylic acid
  SITE 6: note = (2S,3S)-2-Amino-3-(3-methylnaphthalen-1-yl)butanoic acid
  SITE 8: note = D-N-methyl-Alanine
  SITE 10: note = 4-[4-[(2S)-2-amino-2-carboxy-ethyl]phenyl]benzoic acid
  SITE 11: note = (S)-2-amino-5-methoxypentanoic acid
  SITE 13: note = (2R,4S)-4-aminopyrrolidine-2-carboxylic acid
XWXGPXDXGXXAPP

SEQ ID NO: 205 - protein, 14 aa, synthetic construct
  SITE 1: note (2S)-3-[4-(2-acetamidoethoxy)phenyl]-2-amino-propanoic acid
  SITE 3: note = 4-[(2S)-2-amino-2-carboxy-ethyl]benzoic acid
  SITE 5: note = (2S,4R)-4-aminopyrrolidine-2-carboxylic acid
  SITE 6: note = (2S,3S)-2-Amino-3-(3-methylnaphthalen-1-yl)butanoic acid
  SITE 7: note = (2S)-2-amino-5-ureido-pentanoic acid
  SITE 8: note = D-N-methyl-Alanine
  SITE 10: note = 4-[4-[(2S)-2-amino-2-carboxy-ethyl]phenyl]benzoic acid
  SITE 11: note = (S)-2-amino-5-methoxypentanoic acid
  SITE 13: note = (2R,4S)-4-aminopyrrolidine-2-carboxylic acid
XWFGPXXXGXXAPP

SEQ ID NO: 206 - protein, 14 aa, synthetic construct
  SITE 1: note (2S)-3-[4-(2-acetamidoethoxy)phenyl]-2-amino-propanoic acid
  SITE 3: note (S)-2-Amino-3-(4-(5-oxo-4,5-dihydro-1,2,4-oxadiazol-3-yl)ph enyl)propanoic acid
  SITE 5: note = (2S,4R)-4-aminopyrrolidine-2-carboxylic acid
  SITE 6: note = (2S,3S)-2-Amino-3-(3-methylnaphthalen-1-yl)butanoic acid
  SITE 7: note = (2S)-2-amino-5-ureido-pentanoic acid
  SITE 8: note = D-N-methyl-Alanine
  SITE 10: note = 4-[4-[(2S)-2-amino-2-carboxy-ethyl]phenyl]benzoic acid
  SITE 11: note = (S)-2-amino-5-methoxypentanoic acid
  SITE 13: note = (2R,4S)-4-aminopyrrolidine-2-carboxylic acid
XWXGPXXXGXXAPP

SEQ ID NO: 207 - protein, 14 aa, synthetic construct
  SITE 1: note (2S)-3-[4-(2-acetamidoethoxy)phenyl]-2-amino-propanoic acid
  SITE 3: note (S)-2-Amino-3-(4-(5-oxo-4,5-dihydro-1,2,4-oxadiazol-3-yl)ph enyl)propanoic acid
  SITE 5: note = (2S,4R)-4-aminopyrrolidine-2-carboxylic acid
  SITE 6: note = (2S,3S)-2-Amino-3-(3-methylnaphthalen-1-yl)butanoic acid
  SITE 7: note = (2S)-2-amino-5-ureido-pentanoic acid
  SITE 8: note = (R)-piperidine-2-carboxylic acid
  SITE 10: note = 4-[4-[(2S)-2-amino-2-carboxy-ethyl]phenyl]benzoic acid
  SITE 11: note = (S)-2-amino-5-methoxypentanoic acid
  SITE 13: note = (2R,4S)-4-aminopyrrolidine-2-carboxylic acid
XWXGPXXXGXXAPP

SEQ ID NO: 208 - protein, 14 aa, synthetic construct
  SITE 1: note (2S)-3-[4-(2-acetamidoethoxy)phenyl]-2-amino-propanoic acid
  SITE 3: note (S)-2-Amino-3-(4-(5-oxo-4,5-dihydro-1,2,4-oxadiazol-3-yl)ph enyl)propanoic acid
  SITE 5: note = (2S,4R)-4-aminopyrrolidine-2-carboxylic acid
  SITE 6: note = (2S,3S)-2-Amino-3-(3-methylnaphthalen-1-yl)butanoic acid
  SITE 7: note = (2S)-2-amino-5-ureido-pentanoic acid
  SITE 8: note = (R)-piperidine-2-carboxylic acid
  SITE 10: note (S)-2-Amino-3-(4-((1r,4S)-4-(tert-butoxycarbonyl)cyclohexyl )phenyl)propanoic acid
  SITE 11: note = (S)-2-amino-5-methoxypentanoic acid
  SITE 13: note = (2R,4S)-4-aminopyrrolidine-2-carboxylic acid
XWXGPXXXGXXAPP

SEQ ID NO: 209 - protein, 14 aa, synthetic construct
  SITE 1: note (2S)-3-[4-(2-acetamidoethoxy)phenyl]-2-amino-propanoic acid
  SITE 3: note (S)-2-Amino-3-(4-(5-oxo-4,5-dihydro-1,2,4-oxadiazol-3-yl)ph enyl)propanoic acid
  SITE 5: note = (2S,4R)-4-aminopyrrolidine-2-carboxylic acid
  SITE 6: note = (2S,3S)-2-Amino-3-(3-methylnaphthalen-1-yl)butanoic acid
  SITE 7: note = (2S)-2-amino-5-ureido-pentanoic acid
  SITE 8: note = (R)-piperidine-2-carboxylic acid
  SITE 10: note (S)-2-Amino-3-(4-((1r,4S)-4-(tert-butoxycarbonyl)cyclohexyl )phenyl)propanoic acid
  SITE 11: note = (S)-2-amino-5-methoxypentanoic acid
  SITE 12: note = (S)-2-Aminopentanoic acid
  SITE 13: note = (2R,4S)-4-aminopyrrolidine-2-carboxylic acid
XWXGPXXXGXXXPP

SEQ ID NO: 210 - protein, 14 aa, synthetic construct
  SITE 1: note (2S)-3-[4-(2-acetamidoethoxy)phenyl]-2-amino-propanoic acid
  SITE 3: note (S)-2-Amino-3-(4-(5-oxo-4,5-dihydro-1,2,4-oxadiazol-3-yl)ph enyl)propanoic acid
  SITE 5: note = (2S,4R)-4-aminopyrrolidine-2-carboxylic acid
  SITE 6: note = (2S,3S)-2-Amino-3-(3-methylnaphthalen-1-yl)butanoic acid
  SITE 7: note = (2S)-2-amino-5-ureido-pentanoic acid
  SITE 8: note = (R)-piperidine-2-carboxylic acid
  SITE 10: note (S)-2-Amino-3-(4-((1r,4S)-4-(tert-butoxycarbonyl)cyclohexyl )phenyl)propanoic acid
  SITE 11: note = (S)-2-amino-5-methoxypentanoic acid
  SITE 13: note = (2R,4S)-4-hydroxypyrrolidine-2-carboxylic acid
XWXGPXXXGXXAXP

SEQ ID NO: 211 - protein, 14 aa, synthetic construct
  SITE 1: note (2S)-3-[4-(2-acetamidoethoxy)phenyl]-2-amino-propanoic acid
  SITE 3: note = 4-[(2S)-2-amino-2-carboxy-ethyl]benzoic acid
  SITE 5: note = (2S,4R)-4-aminopyrrolidine-2-carboxylic acid
  SITE 6: note = (2S,3S)-2-Amino-3-(3-chloronaphthalen-1-yl)butanoic acid
  SITE 8: note = D-N-methyl-Alanine
  SITE 10: note (S)-2-Amino-3-(4-((1r,4S)-4-(tert-butoxycarbonyl)cyclohexyl )phenyl)propanoic acid
  SITE 11: note = (S)-2-amino-5-methoxypentanoic acid
  SITE 13: note = (2R,4S)-4-aminopyrrolidine-2-carboxylic acid
XWFGPXDXGXXAPP

SEQ ID NO: 212 - protein, 14 aa, synthetic construct
  SITE 1: note (2S)-3-[4-(2-acetamidoethoxy)phenyl]-2-amino-propanoic acid
  SITE 3: note = 4-[(2S)-2-amino-2-carboxy-ethyl]benzoic acid
  SITE 5: note = (2S,4R)-4-aminopyrrolidine-2-carboxylic acid
  SITE 6: note = (2S,3S)-2-Amino-3-(3-methylnaphthalen-1-yl)butanoic acid
  SITE 8: note = D-N-methyl-Alanine
  SITE 10: note (S)-2-Amino-3-(4-((1r,4S)-4-(tert-butoxycarbonyl)cyclohexyl )phenyl)propanoic acid
  SITE 11: note = (S)-2-amino-5-methoxypentanoic acid
  SITE 13: note = (2R,4S)-4-aminopyrrolidine-2-carboxylic acid
XWFGPXDXGXXAPP

SEQ ID NO: 213 - protein, 14 aa, synthetic construct
  SITE 1: note (2S)-3-[4-(2-acetamidoethoxy)phenyl]-2-amino-propanoic acid
  SITE 3: note = 4-[(2S)-2-amino-2-carboxy-ethyl]benzoic acid
  SITE 5: note = (2S,4R)-4-aminopyrrolidine-2-carboxylic acid
  SITE 6: note = (2S,3S)-2-Amino-3-(3-chloronaphthalen-1-yl)butanoic acid
  SITE 8: note = D-N-methyl-Alanine
  SITE 10: note (S)-2-Amino-3-(4-((1r,4S)-4-(tert-butoxycarbonyl)cyclohexyl )phenyl)propanoic acid
  SITE 11: note = (S)-2-amino-5-methoxypentanoic acid
  SITE 13: note = (2R,4S)-4-aminopyrrolidine-2-carboxylic acid
  SITE 14: note (2S,4R)-4-(pyrimidin-5-ylmethyl)pyrrolidine-2-carboxylic acid
XWFGPXDXGXXAPX

SEQ ID NO: 214 - protein, 14 aa, synthetic construct
  SITE 1: note (2S)-3-[4-(2-acetamidoethoxy)phenyl]-2-amino-propanoic acid
  SITE 3: note = 4-[(2S)-2-amino-2-carboxy-ethyl]benzoic acid
  SITE 5: note = (2S,4R)-4-aminopyrrolidine-2-carboxylic acid
  SITE 6: note = (2S,3S)-2-Amino-3-(3-methylnaphthalen-1-yl)butanoic acid
  SITE 8: note = D-N-methyl-Alanine
  SITE 10: note (S)-2-Amino-3-(4-((1r,4S)-4-(tert-butoxycarbonyl)cyclohexyl )phenyl)propanoic acid
  SITE 11: note = (S)-2-amino-5-methoxypentanoic acid
  SITE 13: note = (2R,4S)-4-aminopyrrolidine-2-carboxylic acid
  SITE 14: note (2S,4R)-4-(pyrimidin-5-ylmethyl)pyrrolidine-2-carboxylic acid
XWFGPXDXGXXAPX

SEQ ID NO: 215 - protein, 14 aa, synthetic construct
  SITE 1: note (2S)-3-[4-(2-acetamidoethoxy)phenyl]-2-amino-propanoic acid
  SITE 3: note = 4-[(2S)-2-amino-2-carboxy-ethyl]benzoic acid
  SITE 5: note = (2S,4R)-4-aminopyrrolidine-2-carboxylic acid
  SITE 6: note = (2S,3S)-2-Amino-3-(3-chloronaphthalen-1-yl)butanoic acid
  SITE 8: note = D-N-methyl-Alanine
  SITE 11: note = (S)-2-amino-5-methoxypentanoic acid
  SITE 13: note = (2R,4S)-4-aminopyrrolidine-2-carboxylic acid
  SITE 14: note (2S,4R)-4-(pyrimidin-5-ylmethyl)pyrrolidine-2-carboxylic acid
XWFGPXDXGYXAPX

SEQ ID NO: 216 - protein, 14 aa, synthetic construct
  SITE 1: note (2S)-3-[4-(2-acetamidoethoxy)phenyl]-2-amino-propanoic acid
  SITE 3: note = 4-[(2S)-2-amino-2-carboxy-ethyl]benzoic acid
  SITE 5: note = (2S,4R)-4-aminopyrrolidine-2-carboxylic acid
  SITE 6: note = (2S,3S)-2-Amino-3-(3-methylnaphthalen-1-yl)butanoic acid
  SITE 8: note = D-N-methyl-Alanine
  SITE 11: note = (S)-2-amino-5-methoxypentanoic acid
  SITE 13: note = (2R,4S)-4-aminopyrrolidine-2-carboxylic acid
  SITE 14: note (2S,4R)-4-(pyrimidin-5-ylmethyl)pyrrolidine-2-carboxylic acid
XWFGPXDXGYXAPX

SEQ ID NO: 217 - protein, 14 aa, synthetic construct
  SITE 1: note (2S)-3-[4-(2-acetamidoethoxy)phenyl]-2-amino-propanoic acid
  SITE 3: note = 4-[(2S)-2-amino-2-carboxy-ethyl]benzoic acid
  SITE 5: note = (2S,4R)-4-aminopyrrolidine-2-carboxylic acid
  SITE 6: note = (2S,3S)-2-Amino-3-(3-chloronaphthalen-1-yl)butanoic acid
  SITE 8: note = D-N-methyl-Alanine
  SITE 11: note = (S)-2-amino-5-methoxypentanoic acid
  SITE 13: note = (2R,4S)-4-aminopyrrolidine-2-carboxylic acid
  SITE 14: note = (2S,4R)-4-(4-(pyrimidin-5-yl)benzyl) pyrrolidine-2-carboxylic acid
XWFGPXDXGYXAPX

SEQ ID NO: 218 - protein, 14 aa, synthetic construct
  SITE 1: note (2S)-3-[4-(2-acetamidoethoxy)phenyl]-2-amino-propanoic acid
  SITE 3: note = 4-[(2S)-2-amino-2-carboxy-ethyl]benzoic acid
  SITE 5: note = (2S,4R)-4-aminopyrrolidine-2-carboxylic acid
  SITE 6: note = (2S,3S)-2-Amino-3-(3-methylnaphthalen-1-yl)butanoic acid
  SITE 8: note = D-N-methyl-Alanine
  SITE 11: note = (S)-2-amino-5-methoxypentanoic acid
  SITE 13: note = (2R,4S)-4-aminopyrrolidine-2-carboxylic acid
  SITE 14: note = (2S,4R)-4-(4-(pyrimidin-5-yl)benzyl) pyrrolidine-2-carboxylic acid
XWFGPXDXGYXAPX

SEQ ID NO: 219 - protein, 14 aa, synthetic construct
  SITE 1: note (2S)-3-[4-(2-acetamidoethoxy)phenyl]-2-amino-propanoic acid
  SITE 3: note = 4-[(2S)-2-amino-2-carboxy-ethyl]benzoic acid
  SITE 5: note = (2S,4R)-4-aminopyrrolidine-2-carboxylic acid
  SITE 6: note = (2S,3S)-2-Amino-3-(3-chloronaphthalen-1-yl)butanoic acid
  SITE 8: note = D-N-methyl-Alanine
  SITE 10: note = 4-[4-[(2S)-2-amino-2-carboxy-ethyl]phenyl]benzoic acid
  SITE 13: note = (2R,4S)-4-aminopyrrolidine-2-carboxylic acid
  SITE 14: note = (2S,4R)-4-(4-(pyrimidin-5-yl)benzyl) pyrrolidine-2-carboxylic acid
XWFGPXDXGXSSPX

SEQ ID NO: 220 - protein, 14 aa, synthetic construct
  SITE 1: note (2S)-3-[4-(2-acetamidoethoxy)phenyl]-2-amino-propanoic acid
  SITE 3: note = 4-[(2S)-2-amino-2-carboxy-ethyl]benzoic acid
  SITE 5: note = (2S,4R)-4-aminopyrrolidine-2-carboxylic acid
  SITE 6: note = (2S,3S)-2-Amino-3-(3-methylnaphthalen-1-yl)butanoic acid
  SITE 8: note = D-N-methyl-Alanine
  SITE 10: note = 4-[4-[(2S)-2-amino-2-carboxy-ethyl]phenyl]benzoic acid
  SITE 13: note = (2R,4S)-4-aminopyrrolidine-2-carboxylic acid
  SITE 14: note = (2S,4R)-4-(4-(pyrimidin-5-yl)benzyl) pyrrolidine-2-carboxylic acid
XWFGPXDXGXSSPX

SEQ ID NO: 221 - protein, 14 aa, synthetic construct
  SITE 1: note (2S)-3-[4-(2-acetamidoethoxy)phenyl]-2-amino-propanoic acid
  SITE 3: note = 4-[(2S)-2-amino-2-carboxy-ethyl]benzoic acid
  SITE 5: note = (2S,4R)-4-aminopyrrolidine-2-carboxylic acid
  SITE 6: note = (2S,3S)-2-Amino-3-(3-chloronaphthalen-1-yl)butanoic acid
  SITE 8: note = D-N-methyl-Alanine
  SITE 10: note = 4-[4-[(2S)-2-amino-2-carboxy-ethyl]phenyl]benzoic acid
  SITE 11: note = (S)-2-amino-5-methoxypentanoic acid
  SITE 13: note = (2R,4S)-4-aminopyrrolidine-2-carboxylic acid
  SITE 14: note = (2S,4R)-4-(4-(pyrimidin-5-yl)benzyl) pyrrolidine-2-carboxylic acid
XWFGPXDXGXXSPX

SEQ ID NO: 222 - protein, 14 aa, synthetic construct
  SITE 1: note (2S)-3-[4-(2-acetamidoethoxy)phenyl]-2-amino-propanoic acid
  SITE 3: note = 4-[(2S)-2-amino-2-carboxy-ethyl]benzoic acid
  SITE 5: note = (2S,4R)-4-aminopyrrolidine-2-carboxylic acid
  SITE 6: note = (2S,3S)-2-Amino-3-(3-methylnaphthalen-1-yl)butanoic acid
  SITE 8: note = D-N-methyl-Alanine
  SITE 10: note = 4-[4-[(2S)-2-amino-2-carboxy-ethyl]phenyl]benzoic acid
  SITE 11: note = (S)-2-amino-5-methoxypentanoic acid
  SITE 13: note = (2R,4S)-4-aminopyrrolidine-2-carboxylic acid
  SITE 14: note = (2S,4R)-4-(4-(pyrimidin-5-yl)benzyl) pyrrolidine-2-carboxylic acid
XWFGPXDXGXXSPX

SEQ ID NO: 223 - protein, 14 aa, synthetic construct
  SITE 1: note (2S)-3-[4-(2-acetamidoethoxy)phenyl]-2-amino-propanoic acid
  SITE 3: note = 4-[(2S)-2-amino-2-carboxy-ethyl]benzoic acid
  SITE 5: note = (2S,4R)-4-aminopyrrolidine-2-carboxylic acid
  SITE 6: note = (2S,3S)-2-Amino-3-(3-chloronaphthalen-1-yl)butanoic acid
  SITE 8: note = D-N-methyl-Alanine
  SITE 10: note = 4-[4-[(2S)-2-amino-2-carboxy-ethyl]phenyl]benzoic acid
  SITE 11: note = (S)-2-amino-5-methoxypentanoic acid
  SITE 13: note = (2R,4S)-4-aminopyrrolidine-2-carboxylic acid
  SITE 14: note (2S,4R)-4-(pyrimidin-5-ylmethyl)pyrrolidine-2-carboxylic acid
XWFGPXDXGXXAPX

SEQ ID NO: 224 - protein, 14 aa, synthetic construct
  SITE 1: note (2S)-3-[4-(2-acetamidoethoxy)phenyl]-2-amino-propanoic acid
  SITE 3: note = 4-[(2S)-2-amino-2-carboxy-ethyl]benzoic acid
  SITE 5: note = (2S,4R)-4-aminopyrrolidine-2-carboxylic acid
  SITE 6: note = (2S,3S)-2-Amino-3-(3-methylnaphthalen-1-yl)butanoic acid
  SITE 8: note = D-N-methyl-Alanine
  SITE 10: note = 4-[4-[(2S)-2-amino-2-carboxy-ethyl]phenyl]benzoic acid
  SITE 11: note = (S)-2-amino-5-methoxypentanoic acid
  SITE 13: note = (2R,4S)-4-aminopyrrolidine-2-carboxylic acid
  SITE 14: note (2S,4R)-4-(pyrimidin-5-ylmethyl)pyrrolidine-2-carboxylic acid
XWFGPXDXGXXAPX

SEQ ID NO: 225 - protein, 14 aa, synthetic construct
  SITE 1: note (2S)-3-[4-(2-acetamidoethoxy)phenyl]-2-amino-propanoic acid
  SITE 3: note = 4-[(2S)-2-amino-2-carboxy-ethyl]benzoic acid
  SITE 5: note = (2S,4R)-4-aminopyrrolidine-2-carboxylic acid
  SITE 6: note = (2S,3S)-2-Amino-3-(3-chloronaphthalen-1-yl)butanoic acid
  SITE 8: note = D-N-methyl-Alanine
  SITE 10: note = 4-[4-[(2S)-2-amino-2-carboxy-ethyl]phenyl]benzoic acid
  SITE 11: note = (S)-2-amino-5-methoxypentanoic acid
  SITE 13: note = (2R,4S)-4-aminopyrrolidine-2-carboxylic acid
XWFGPXDXGXXAPP

SEQ ID NO: 226 - protein, 14 aa, synthetic construct
  SITE 1: note (2S)-3-[4-(2-acetamidoethoxy)phenyl]-2-amino-propanoic acid
  SITE 3: note = 4-[(2S)-2-amino-2-carboxy-ethyl]benzoic acid
  SITE 5: note = (2S,4R)-4-aminopyrrolidine-2-carboxylic acid
  SITE 6: note = (2S,3S)-2-Amino-3-(3-chloronaphthalen-1-yl)butanoic acid
  SITE 8: note = D-N-methyl-Alanine
  SITE 10: note = 4-[4-[(2S)-2-amino-2-carboxy-ethyl]phenyl]benzoic acid
  SITE 11: note = (S)-2-amino-5-methoxypentanoic acid
  SITE 13: note = (2R,4S)-4-aminopyrrolidine-2-carboxylic acid
  SITE 14: note = (2S,4R)-4-(4-(pyrimidin-5-yl)benzyl) pyrrolidine-2-carboxylic acid
XWFGPXDXGXXAPX

SEQ ID NO: 227 - protein, 14 aa, synthetic construct
  SITE 1: note (2S)-3-[4-(2-acetamidoethoxy)phenyl]-2-amino-propanoic acid
  SITE 3: note = 4-[(2S)-2-amino-2-carboxy-ethyl]benzoic acid
  SITE 5: note = (2S,4R)-4-aminopyrrolidine-2-carboxylic acid
  SITE 6: note = (2S,3S)-2-amino-3-(1-naphthyl)butanoic acid
  SITE 8: note = D-N-methyl-Alanine
  SITE 10: note 4-[5-[(2S)-2-amino-2-carboxy-ethyl]-2-pyridyl]benzoic acid
  SITE 13: note = (2R,4S)-4-aminopyrrolidine-2-carboxylic acid
  SITE 14: note = (2S,4R)-4-(4-(pyrimidin-5-yl)benzyl) pyrrolidine-2-carboxylic acid
XWFGPXDXGXAAPX

SEQ ID NO: 228 - protein, 14 aa, synthetic construct
  SITE 1: note (2S)-3-[4-(2-acetamidoethoxy)phenyl]-2-amino-propanoic acid
  SITE 3: note = 4-[(2S)-2-amino-2-carboxy-ethyl]benzoic acid
  SITE 5: note = (2S,4R)-4-aminopyrrolidine-2-carboxylic acid
  SITE 6: note = (2S,3S)-2-amino-3-(1-naphthyl)butanoic acid
  SITE 8: note = D-N-methyl-Alanine
  SITE 10: note 4-[5-[(2S)-2-amino-2-carboxy-ethyl]-2-pyridyl]benzoic acid
  SITE 11: note = (S)-2-amino-5-methoxypentanoic acid
  SITE 12: note = (S)-2-Aminopentanoic acid
  SITE 13: note = (2R,4S)-4-aminopyrrolidine-2-carboxylic acid
  SITE 14: note = (2S,4R)-4-(4-(pyrimidin-5-yl)benzyl) pyrrolidine-2-carboxylic acid
XWFGPXDXGXXXPX

SEQ ID NO: 229 - protein, 14 aa, synthetic construct
  SITE 1: note (2S)-3-[4-(2-acetamidoethoxy)phenyl]-2-amino-propanoic acid
  SITE 3: note = 4-[(2S)-2-amino-2-carboxy-ethyl]benzoic acid
  SITE 5: note = (2S,4R)-4-aminopyrrolidine-2-carboxylic acid
  SITE 6: note = (2S,3S)-2-Amino-3-(3-chloronaphthalen-1-yl)butanoic acid
  SITE 8: note = D-N-methyl-Alanine
  SITE 10: note 4-[5-[(2S)-2-amino-2-carboxy-ethyl]-2-pyridyl]benzoic acid
  SITE 13: note = (2R,4S)-4-aminopyrrolidine-2-carboxylic acid
XWFGPXDXGXAAPP

SEQ ID NO: 230 - protein, 14 aa, synthetic construct
  SITE 1: note (2S)-3-[4-(2-acetamidoethoxy)phenyl]-2-amino-propanoic acid
  SITE 3: note = 4-[(2S)-2-amino-2-carboxy-ethyl]benzoic acid
  SITE 5: note = (2S,4R)-4-aminopyrrolidine-2-carboxylic acid
  SITE 6: note = (2S,3S)-2-Amino-3-(3-chloronaphthalen-1-yl)butanoic acid
  SITE 8: note = D-N-methyl-Alanine
  SITE 10: note 4-[5-[(2S)-2-amino-2-carboxy-ethyl]-2-pyridyl]benzoic acid
  SITE 11: note = (S)-2-amino-5-methoxypentanoic acid
  SITE 13: note = (2R,4S)-4-aminopyrrolidine-2-carboxylic acid
XWFGPXDXGXXAPP

SEQ ID NO: 231 - protein, 14 aa, synthetic construct
  SITE 1: note (2S)-3-[4-(2-acetamidoethoxy)phenyl]-2-amino-propanoic acid
  SITE 3: note = 4-[(2S)-2-amino-2-carboxy-ethyl]benzoic acid
  SITE 5: note = (2S,4R)-4-aminopyrrolidine-2-carboxylic acid
  SITE 6: note = (2S,3S)-2-Amino-3-(3-methylnaphthalen-1-yl)butanoic acid
  SITE 8: note = D-N-methyl-Alanine
  SITE 10: note 4-[5-[(2S)-2-amino-2-carboxy-ethyl]-2-pyridyl]benzoic acid
  SITE 11: note = (S)-2-amino-5-methoxypentanoic acid
  SITE 13: note = (2R,4S)-4-aminopyrrolidine-2-carboxylic acid
XWFGPXDXGXXAPP

SEQ ID NO: 232 - protein, 14 aa, synthetic construct
  SITE 1: note (2S)-3-[4-(2-acetamidoethoxy)phenyl]-2-amino-propanoic acid
  SITE 3: note (S)-2-Amino-3-(4-(5-oxo-4,5-dihydro-1,2,4-oxadiazol-3-yl)ph enyl)propanoic acid
  SITE 5: note = (2S,4R)-4-aminopyrrolidine-2-carboxylic acid
  SITE 6: note = (2S,3S)-2-Amino-3-(3-methylnaphthalen-1-yl)butanoic acid
  SITE 7: note = (2S)-2-amino-5-ureido-pentanoic acid
  SITE 8: note = (R)-piperidine-2-carboxylic acid
  SITE 10: note 4-[5-[(2S)-2-amino-2-carboxy-ethyl]-2-pyridyl]benzoic acid
  SITE 11: note = (S)-2-amino-5-methoxypentanoic acid
  SITE 13: note = (2R,4S)-4-hydroxypyrrolidine-2-carboxylic acid
XWXGPXXXGXXAXP

SEQ ID NO: 233 - protein, 14 aa, synthetic construct
  SITE 1: note (2S)-3-[4-(2-acetamidoethoxy)phenyl]-2-amino-propanoic acid
  SITE 3: note = (S)-2-Amino-3-(4-carbamoylphenyl)propanoic acid
  SITE 5: note = (2S,4R)-4-aminopyrrolidine-2-carboxylic acid
  SITE 6: note = (2S,3S)-2-Amino-3-(3-methylnaphthalen-1-yl)butanoic acid
  SITE 7: note = (2S)-2-amino-5-ureido-pentanoic acid
  SITE 8: note = D-N-methyl-Alanine
  SITE 10: note 4-[5-[(2S)-2-amino-2-carboxy-ethyl]-2-pyridyl]benzoic acid
  SITE 11: note = (S)-2-amino-5-methoxypentanoic acid
  SITE 12: note = (S)-2-Aminopentanoic acid
  SITE 13: note = (2R,4S)-4-hydroxypyrrolidine-2-carboxylic acid
  SITE 14: note = (2S,4R)-4-(4-(pyrimidin-5-yl)benzyl) pyrrolidine-2-carboxylic acid
XWFGPXXXGXXXXX

SEQ ID NO: 234 - protein, 14 aa, synthetic construct
  SITE 1: note (2S)-3-[4-(2-acetamidoethoxy)phenyl]-2-amino-propanoic acid
  SITE 3: note (S)-2-Amino-3-(4-(5-oxo-4,5-dihydro-1,2,4-oxadiazol-3-yl)ph enyl)propanoic acid
  SITE 5: note = (2S,4R)-4-aminopyrrolidine-2-carboxylic acid
  SITE 6: note = (2S,3S)-2-Amino-3-(3-methylnaphthalen-1-yl)butanoic acid
  SITE 7: note = (2S)-2-amino-5-ureido-pentanoic acid
  SITE 8: note = (R)-piperidine-2-carboxylic acid
  SITE 10: note 4-[5-[(2S)-2-amino-2-carboxy-ethyl]-2-pyridyl]benzoic acid
  SITE 11: note = (S)-2-amino-5-methoxypentanoic acid
  SITE 12: note = (S)-2-Aminopentanoic acid
  SITE 13: note = (2R,4S)-4-aminopyrrolidine-2-carboxylic acid
XWXGPXXXGXXXPP

SEQ ID NO: 235 - protein, 14 aa, synthetic construct
  SITE 1: note (2S)-3-[4-(2-acetamidoethoxy)phenyl]-2-amino-propanoic acid
  SITE 3: note = (S)-2-Amino-3-(4-carbamoylphenyl)propanoic acid
  SITE 5: note = (2S,4R)-4-aminopyrrolidine-2-carboxylic acid
  SITE 6: note = (2S,3S)-2-Amino-3-(3-chloronaphthalen-1-yl)butanoic acid
  SITE 8: note = (R)-piperidine-2-carboxylic acid
  SITE 10: note 4-[5-[(2S)-2-amino-2-carboxy-ethyl]-2-pyridyl]benzoic acid
  SITE 12: note = (S)-4-Amino-4-carboxy-N,N,N-trimethylbutan-1-aminium
  SITE 13: note = (2R,4S)-4-hydroxypyrrolidine-2-carboxylic acid
  SITE 14: note (2S,4R)-4-(pyrimidin-5-ylmethyl)pyrrolidine-2-carboxylic acid
XWFGPXNXGXSXXX

SEQ ID NO: 236 - protein, 14 aa, synthetic construct
  SITE 1: note (2S)-3-[4-(2-acetamidoethoxy)phenyl]-2-amino-propanoic acid
  SITE 3: note = (S)-2-Amino-3-(4-carbamoylphenyl)propanoic acid
  SITE 5: note = (2S,4R)-4-aminopyrrolidine-2-carboxylic acid
  SITE 6: note = (2S,3S)-2-Amino-3-(3-chloronaphthalen-1-yl)butanoic acid
  SITE 7: note = (2S)-2-amino-5-ureido-pentanoic acid
  SITE 8: note = (R)-piperidine-2-carboxylic acid
  SITE 10: note 4-[5-[(2S)-2-amino-2-carboxy-ethyl]-2-pyridyl]benzoic acid
  SITE 12: note = (S)-4-Amino-4-carboxy-N,N,N-trimethylbutan-1-aminium
  SITE 13: note = (2R,4S)-4-hydroxypyrrolidine-2-carboxylic acid
  SITE 14: note (2S,4R)-4-(pyrimidin-5-ylmethyl)pyrrolidine-2-carboxylic acid
XWFGPXXXGXSXXX

SEQ ID NO: 237 - protein, 14 aa, synthetic construct
  SITE 1: note (2S)-3-[4-(2-acetamidoethoxy)phenyl]-2-amino-propanoic acid
  SITE 3: note = (S)-2-Amino-3-(4-carbamoylphenyl)propanoic acid
  SITE 5: note = (2S,4R)-4-aminopyrrolidine-2-carboxylic acid
  SITE 6: note = (2S,3S)-2-Amino-3-(3-chloronaphthalen-1-yl)butanoic acid
  SITE 8: note = D-N-methyl-Alanine
  SITE 10: note 4-[5-[(2S)-2-amino-2-carboxy-ethyl]-2-pyridyl]benzoic acid
  SITE 12: note = (S)-4-Amino-4-carboxy-N,N,N-trimethylbutan-1-aminium
  SITE 13: note = (2R,4S)-4-hydroxypyrrolidine-2-carboxylic acid
  SITE 14: note (2S,4R)-4-(pyrimidin-5-ylmethyl)pyrrolidine-2-carboxylic acid
XWFGPXNXGXSXXX

SEQ ID NO: 238 - protein, 14 aa, synthetic construct
  SITE 1: note (2S)-3-[4-(2-acetamidoethoxy)phenyl]-2-amino-propanoic acid
  SITE 3: note = (S)-2-Amino-3-(4-carbamoylphenyl)propanoic acid
  SITE 5: note = (2S,4R)-4-aminopyrrolidine-2-carboxylic acid
  SITE 6: note = (2S,3S)-2-Amino-3-(3-chloronaphthalen-1-yl)butanoic acid
  SITE 7: note = N4,N4-dimethyl-L-asparagine
  SITE 8: note = D-N-methyl-Alanine
  SITE 10: note 4-[5-[(2S)-2-amino-2-carboxy-ethyl]-2-pyridyl]benzoic acid
  SITE 12: note = (S)-4-Amino-4-carboxy-N,N,N-trimethylbutan-1-aminium
  SITE 13: note = (2R,4S)-4-hydroxypyrrolidine-2-carboxylic acid
  SITE 14: note (2S,4R)-4-(pyrimidin-5-ylmethyl)pyrrolidine-2-carboxylic acid
XWFGPXXXGXSXXX

SEQ ID NO: 239 - protein, 14 aa, synthetic construct
  SITE 1: note (2S)-3-[4-(2-acetamidoethoxy)phenyl]-2-amino-propanoic acid
  SITE 3: note = (S)-2-Amino-3-(4-carbamoylphenyl)propanoic acid
  SITE 5: note = (2S,4R)-4-aminopyrrolidine-2-carboxylic acid
  SITE 6: note = (2S,3S)-2-Amino-3-(3-chloronaphthalen-1-yl)butanoic acid
  SITE 7: note = (2S)-2-amino-5-ureido-pentanoic acid
  SITE 8: note = D-N-methyl-Alanine
  SITE 10: note 4-[5-[(2S)-2-amino-2-carboxy-ethyl]-2-pyridyl]benzoic acid
  SITE 12: note = (S)-4-Amino-4-carboxy-N,N,N-trimethylbutan-1-aminium
  SITE 13: note = (2R,4S)-4-hydroxypyrrolidine-2-carboxylic acid
  SITE 14: note (2S,4R)-4-(pyrimidin-5-ylmethyl)pyrrolidine-2-carboxylic acid
XWFGPXXXGXSXXX

SEQ ID NO: 240 - protein, 14 aa, synthetic construct
  SITE 1: note (2S)-3-[4-(2-acetamidoethoxy)phenyl]-2-amino-propanoic acid
  SITE 3: note = (S)-2-Amino-3-(4-carbamoylphenyl)propanoic acid
  SITE 5: note = (2S,4R)-4-aminopyrrolidine-2-carboxylic acid
  SITE 6: note = (2S,3S)-2-Amino-3-(3-chloronaphthalen-1-yl)butanoic acid
  SITE 8: note = D-N-methyl-Alanine
  SITE 10: note = 4-[4-[(2S)-2-amino-2-carboxy-ethyl]phenyl]benzoic acid
  SITE 12: note = (S)-4-Amino-4-carboxy-N,N,N-trimethylbutan-1-aminium
  SITE 13: note = (2R,4S)-4-hydroxypyrrolidine-2-carboxylic acid
  SITE 14: note (2S,4R)-4-(pyrimidin-5-ylmethyl)pyrrolidine-2-carboxylic acid
XWFGPXNXGXSXXX

SEQ ID NO: 241 - protein, 14 aa, synthetic construct
  SITE 1: note (2S)-3-[4-(2-acetamidoethoxy)phenyl]-2-amino-propanoic acid
  SITE 3: note = (S)-2-Amino-3-(4-carbamoylphenyl)propanoic acid
  SITE 5: note = (2S,4R)-4-aminopyrrolidine-2-carboxylic acid
  SITE 6: note = (2S,3S)-2-Amino-3-(3-chloronaphthalen-1-yl)butanoic acid
  SITE 7: note = N4,N4-dimethyl-L-asparagine
  SITE 8: note = D-N-methyl-Alanine
  SITE 10: note = 4-[4-[(2S)-2-amino-2-carboxy-ethyl]phenyl]benzoic acid
  SITE 12: note = (S)-4-Amino-4-carboxy-N,N,N-trimethylbutan-1-aminium
  SITE 13: note = (2R,4S)-4-hydroxypyrrolidine-2-carboxylic acid
  SITE 14: note (2S,4R)-4-(pyrimidin-5-ylmethyl)pyrrolidine-2-carboxylic acid
XWFGPXXXGXSXXX

SEQ ID NO: 242 - protein, 14 aa, synthetic construct
  SITE 1: note (2S)-3-[4-(2-acetamidoethoxy)phenyl]-2-amino-propanoic acid
  SITE 3: note = (S)-2-Amino-3-(4-carbamoylphenyl)propanoic acid
  SITE 5: note = (2S,4R)-4-aminopyrrolidine-2-carboxylic acid
  SITE 6: note = (2S,3S)-2-Amino-3-(3-chloronaphthalen-1-yl)butanoic acid
  SITE 7: note = (2S)-2-amino-5-ureido-pentanoic acid
  SITE 8: note = D-N-methyl-Alanine
  SITE 10: note = 4-[4-[(2S)-2-amino-2-carboxy-ethyl]phenyl]benzoic acid
  SITE 12: note = (S)-4-Amino-4-carboxy-N,N,N-trimethylbutan-1-aminium
  SITE 13: note = (2R,4S)-4-hydroxypyrrolidine-2-carboxylic acid
  SITE 14: note (2S,4R)-4-(pyrimidin-5-ylmethyl)pyrrolidine-2-carboxylic acid
XWFGPXXXGXSXXX

SEQ ID NO: 243 - protein, 14 aa, synthetic construct
  SITE 1: note (2S)-3-[4-(2-acetamidoethoxy)phenyl]-2-amino-propanoic acid
  SITE 3: note = (S)-2-Amino-3-(4-carbamoylphenyl)propanoic acid
  SITE 5: note = (2S,4R)-4-aminopyrrolidine-2-carboxylic acid
  SITE 6: note = (2S,3S)-2-Amino-3-(3-chloronaphthalen-1-yl)butanoic acid
  SITE 8: note = D-N-methyl-Alanine
  SITE 10: note (S)-2-Amino-3-(4-((1r,4S)-4-(tert-butoxycarbonyl)cyclohexyl )phenyl)propanoic acid
  SITE 13: note = (2R,4S)-4-hydroxypyrrolidine-2-carboxylic acid
  SITE 14: note (2S,4R)-4-(pyrimidin-5-ylmethyl)pyrrolidine-2-carboxylic acid
XWFGPXNXGXSSXX

SEQ ID NO: 244 - protein, 14 aa, synthetic construct
  SITE 1: note (2S)-3-[4-(2-acetamidoethoxy)phenyl]-2-amino-propanoic acid
  SITE 3: note = (S)-2-Amino-3-(4-carbamoylphenyl)propanoic acid
  SITE 5: note = (2S,4R)-4-aminopyrrolidine-2-carboxylic acid
  SITE 6: note = (2S,3S)-2-Amino-3-(3-chloronaphthalen-1-yl)butanoic acid
  SITE 7: note = N4,N4-dimethyl-L-asparagine
  SITE 8: note = D-N-methyl-Alanine
  SITE 10: note (S)-2-Amino-3-(4-((1r,4S)-4-(tert-butoxycarbonyl)cyclohexyl )phenyl)propanoic acid
  SITE 13: note = (2R,4S)-4-hydroxypyrrolidine-2-carboxylic acid
  SITE 14: note (2S,4R)-4-(pyrimidin-5-ylmethyl)pyrrolidine-2-carboxylic acid
XWFGPXXXGXSSXX

SEQ ID NO: 245 - protein, 14 aa, synthetic construct
  SITE 1: note (2S)-3-[4-(2-acetamidoethoxy)phenyl]-2-amino-propanoic acid
  SITE 3: note = (S)-2-Amino-3-(4-carbamoylphenyl)propanoic acid
  SITE 5: note = (2S,4R)-4-aminopyrrolidine-2-carboxylic acid
  SITE 6: note = (2S,3S)-2-Amino-3-(3-chloronaphthalen-1-yl)butanoic acid
  SITE 7: note = (2S)-2-amino-5-ureido-pentanoic acid
  SITE 8: note = D-N-methyl-Alanine
  SITE 10: note (S)-2-Amino-3-(4-((1r,4S)-4-(tert-butoxycarbonyl)cyclohexyl )phenyl)propanoic acid
  SITE 13: note = (2R,4S)-4-hydroxypyrrolidine-2-carboxylic acid
  SITE 14: note (2S,4R)-4-(pyrimidin-5-ylmethyl)pyrrolidine-2-carboxylic acid
XWFGPXXXGXSSXX

SEQ ID NO: 246 - protein, 14 aa, synthetic construct
  SITE 1: note (2S)-3-[4-(2-acetamidoethoxy)phenyl]-2-amino-propanoic acid
  SITE 3: note = (S)-2-Amino-3-(4-carbamoylphenyl)propanoic acid
  SITE 5: note = (2S,4R)-4-aminopyrrolidine-2-carboxylic acid
  SITE 6: note = (2S,3S)-2-Amino-3-(3-chloronaphthalen-1-yl)butanoic acid
  SITE 8: note = D-N-methyl-Alanine
  SITE 10: note 4-[5-[(2S)-2-amino-2-carboxy-ethyl]-2-pyridyl]benzoic acid
  SITE 13: note = (2R,4S)-4-hydroxypyrrolidine-2-carboxylic acid
  SITE 14: note (2S,4R)-4-(pyrimidin-5-ylmethyl)pyrrolidine-2-carboxylic acid
XWFGPXNXGXSSXX

SEQ ID NO: 247 - protein, 14 aa, synthetic construct
  SITE 1: note (2S)-3-[4-(2-acetamidoethoxy)phenyl]-2-amino-propanoic acid
  SITE 3: note = (S)-2-Amino-3-(4-carbamoylphenyl)propanoic acid
  SITE 5: note = (2S,4R)-4-aminopyrrolidine-2-carboxylic acid
  SITE 6: note = (2S,3S)-2-Amino-3-(3-chloronaphthalen-1-yl)butanoic acid
  SITE 7: note = N4,N4-dimethyl-L-asparagine
  SITE 8: note = D-N-methyl-Alanine
  SITE 10: note 4-[5-[(2S)-2-amino-2-carboxy-ethyl]-2-pyridyl]benzoic acid
  SITE 13: note = (2R,4S)-4-hydroxypyrrolidine-2-carboxylic acid
  SITE 14: note (2S,4R)-4-(pyrimidin-5-ylmethyl)pyrrolidine-2-carboxylic acid
XWFGPXXXGXSSXX

SEQ ID NO: 248 - protein, 14 aa, synthetic construct
  SITE 1: note (2S)-3-[4-(2-acetamidoethoxy)phenyl]-2-amino-propanoic acid
  SITE 3: note = (S)-2-Amino-3-(4-carbamoylphenyl)propanoic acid
  SITE 5: note = (2S,4R)-4-aminopyrrolidine-2-carboxylic acid
  SITE 6: note = (2S,3S)-2-Amino-3-(3-chloronaphthalen-1-yl)butanoic acid
  SITE 7: note = (2S)-2-amino-5-ureido-pentanoic acid
  SITE 8: note = D-N-methyl-Alanine
  SITE 10: note 4-[5-[(2S)-2-amino-2-carboxy-ethyl]-2-pyridyl]benzoic acid
  SITE 13: note = (2R,4S)-4-hydroxypyrrolidine-2-carboxylic acid
  SITE 14: note (2S,4R)-4-(pyrimidin-5-ylmethyl)pyrrolidine-2-carboxylic acid
XWFGPXXXGXSSXX

SEQ ID NO: 249 - protein, 14 aa, synthetic construct
  SITE 1: note (2S)-3-[4-(2-acetamidoethoxy)phenyl]-2-amino-propanoic acid
  SITE 3: note = (S)-2-Amino-3-(4-carbamoylphenyl)propanoic acid
  SITE 5: note = (2S,4R)-4-aminopyrrolidine-2-carboxylic acid
  SITE 6: note = (2S,3S)-2-Amino-3-(3-chloronaphthalen-1-yl)butanoic acid
  SITE 8: note = D-N-methyl-Alanine
  SITE 10: note = 4-[4-[(2S)-2-amino-2-carboxy-ethyl]phenyl]benzoic acid
  SITE 13: note = (2R,4S)-4-hydroxypyrrolidine-2-carboxylic acid
  SITE 14: note (2S,4R)-4-(pyrimidin-5-ylmethyl)pyrrolidine-2-carboxylic acid
XWFGPXNXGXSSXX

SEQ ID NO: 250 - protein, 14 aa, synthetic construct
  SITE 1: note (2S)-3-[4-(2-acetamidoethoxy)phenyl]-2-amino-propanoic acid
  SITE 3: note = (S)-2-Amino-3-(4-carbamoylphenyl)propanoic acid
  SITE 5: note = (2S,4R)-4-aminopyrrolidine-2-carboxylic acid
  SITE 6: note = (2S,3S)-2-Amino-3-(3-chloronaphthalen-1-yl)butanoic acid
  SITE 7: note = N4,N4-dimethyl-L-asparagine
  SITE 8: note = D-N-methyl-Alanine
  SITE 10: note = 4-[4-[(2S)-2-amino-2-carboxy-ethyl]phenyl]benzoic acid
  SITE 13: note = (2R,4S)-4-hydroxypyrrolidine-2-carboxylic acid
  SITE 14: note (2S,4R)-4-(pyrimidin-5-ylmethyl)pyrrolidine-2-carboxylic acid
XWFGPXXXGXSSXX

SEQ ID NO: 251 - protein, 14 aa, synthetic construct
  SITE 1: note (2S)-3-[4-(2-acetamidoethoxy)phenyl]-2-amino-propanoic acid
  SITE 3: note = (S)-2-Amino-3-(4-carbamoylphenyl)propanoic acid
  SITE 5: note = (2S,4R)-4-aminopyrrolidine-2-carboxylic acid
  SITE 6: note = (2S,3S)-2-Amino-3-(3-chloronaphthalen-1-yl)butanoic acid
  SITE 7: note = (2S)-2-amino-5-ureido-pentanoic acid
  SITE 8: note = D-N-methyl-Alanine
  SITE 10: note = 4-[4-[(2S)-2-amino-2-carboxy-ethyl]phenyl]benzoic acid
  SITE 13: note = (2R,4S)-4-hydroxypyrrolidine-2-carboxylic acid
  SITE 14: note (2S,4R)-4-(pyrimidin-5-ylmethyl)pyrrolidine-2-carboxylic acid
XWFGPXXXGXSSXX

SEQ ID NO: 252 - protein, 14 aa, synthetic construct
  SITE 1: note (2S)-3-[4-(2-acetamidoethoxy)phenyl]-2-amino-propanoic acid
  SITE 3: note = (S)-2-Amino-3-(4-carbamoylphenyl)propanoic acid
  SITE 5: note = (2S,4R)-4-aminopyrrolidine-2-carboxylic acid
  SITE 6: note = (2S,3S)-2-Amino-3-(3-chloronaphthalen-1-yl)butanoic acid
  SITE 8: note = D-N-methyl-Alanine
  SITE 10: note = 4-[4-[(2S)-2-amino-2-carboxy-ethyl]phenyl]benzoic acid
  SITE 11: note = (S)-2-amino-5-methoxypentanoic acid
  SITE 13: note = (2R,4S)-4-hydroxypyrrolidine-2-carboxylic acid
XWFGPXNXGXXSXP

SEQ ID NO: 253 - protein, 14 aa, synthetic construct
  SITE 1: note (S)-2-(4-(2-amino-2-carboxyethyl)phenoxy)-N,N,N-trimethylet han-1-aminium
  SITE 3: note = 4-[(2S)-2-amino-2-carboxy-ethyl]benzoic acid
  SITE 5: note = (2S,4R)-4-aminopyrrolidine-2-carboxylic acid
  SITE 6: note = (2S,3S)-2-Amino-3-(3-chloronaphthalen-1-yl)butanoic acid
  SITE 8: note = (R)-piperidine-2-carboxylic acid
  SITE 10: note = 4-[4-[(2S)-2-amino-2-carboxy-ethyl]phenyl]benzoic acid
  SITE 11: note (S)-2-(2-(3-((5-amino-5-carboxypentyl)amino)-3-oxopropoxy)e thoxy)-N,N,N-trimethylethan-1-aminium
  SITE 12: note = (S)-2-Aminopentanoic acid
  SITE 13: note = (2R,4S)-4-hydroxypyrrolidine-2-carboxylic acid
  SITE 14: note = (2S,4R)-4-(4-(pyrimidin-5-yl)benzyl) pyrrolidine-2-carboxylic acid
XWFGPXDXGXXXXX

SEQ ID NO: 254 - protein, 14 aa, synthetic construct
  SITE 1: note (S)-2-(4-(2-amino-2-carboxyethyl)phenoxy)-N,N,N-trimethylet han-1-aminium
  SITE 3: note = 4-[(2S)-2-amino-2-carboxy-ethyl]benzoic acid
  SITE 5: note = (2S,4R)-4-aminopyrrolidine-2-carboxylic acid
  SITE 6: note = (2S,3S)-2-Amino-3-(3-chloronaphthalen-1-yl)butanoic acid
  SITE 8: note = D-N-methyl-Alanine
  SITE 10: note = 4-[4-[(2S)-2-amino-2-carboxy-ethyl]phenyl]benzoic acid
  SITE 11: note (S)-2-(2-(3-((5-amino-5-carboxypentyl)amino)-3-oxopropoxy)e thoxy)-N,N,N-trimethylethan-1-aminium
  SITE 12: note = (S)-2-Aminopentanoic acid
  SITE 13: note = (2R,4S)-4-hydroxypyrrolidine-2-carboxylic acid
  SITE 14: note = (2S,4R)-4-(4-(pyrimidin-5-yl)benzyl) pyrrolidine-2-carboxylic acid
XWFGPXDXGXXXXX

SEQ ID NO: 255 - protein, 14 aa, synthetic construct
  SITE 1: note (S)-2-(4-(2-amino-2-carboxyethyl)phenoxy)-N,N,N-trimethylet han-1-aminium
  SITE 3: note = 4-[(2S)-2-amino-2-carboxy-ethyl]benzoic acid
  SITE 5: note = (2S,4R)-4-aminopyrrolidine-2-carboxylic acid
  SITE 6: note = (2S,3S)-2-Amino-3-(3-chloronaphthalen-1-yl)butanoic acid
  SITE 8: note = (R)-piperidine-2-carboxylic acid
  SITE 10: note = 4-[4-[(2S)-2-amino-2-carboxy-ethyl]phenyl]benzoic acid
  SITE 11: note (S)-2-(2-(3-((5-amino-5-carboxypentyl)amino)-3-oxopropoxy)e thoxy)-N,N,N-trimethylethan-1-aminium
  SITE 12: note = (S)-2-Aminopentanoic acid
  SITE 13: note = (2R,4S)-4-aminopyrrolidine-2-carboxylic acid
  SITE 14: note = (2S,4R)-4-(4-(pyrimidin-5-yl)benzyl) pyrrolidine-2-carboxylic acid
XWFGPXDXGXXXPX

SEQ ID NO: 256 - protein, 14 aa, synthetic construct
  SITE 1: note (S)-2-(4-(2-amino-2-carboxyethyl)phenoxy)-N,N,N-trimethylet han-1-aminium
  SITE 3: note = 4-[(2S)-2-amino-2-carboxy-ethyl]benzoic acid
  SITE 5: note = (2S,4R)-4-aminopyrrolidine-2-carboxylic acid
  SITE 6: note = (2S,3S)-2-Amino-3-(3-chloronaphthalen-1-yl)butanoic acid
  SITE 8: note = D-N-methyl-Alanine
  SITE 10: note = 4-[4-[(2S)-2-amino-2-carboxy-ethyl]phenyl]benzoic acid
  SITE 11: note (S)-2-(2-(3-((5-amino-5-carboxypentyl)amino)-3-oxopropoxy)e thoxy)-N,N,N-trimethylethan-1-aminium
  SITE 12: note = (S)-2-Aminopentanoic acid
  SITE 13: note = (2R,4S)-4-aminopyrrolidine-2-carboxylic acid
  SITE 14: note = (2S,4R)-4-(4-(pyrimidin-5-yl)benzyl) pyrrolidine-2-carboxylic acid
XWFGPXDXGXXXPX

SEQ ID NO: 257 - protein, 14 aa, synthetic construct
  SITE 1: note (S)-2-(4-(2-amino-2-carboxyethyl)phenoxy)-N,N,N-trimethylet han-1-aminium
  SITE 3: note = 4-[(2S)-2-amino-2-carboxy-ethyl]benzoic acid
  SITE 5: note = (2S,4R)-4-aminopyrrolidine-2-carboxylic acid
  SITE 6: note = (2S,3S)-2-Amino-3-(3-chloronaphthalen-1-yl)butanoic acid
  SITE 8: note = D-N-methyl-Alanine
  SITE 10: note 4-[5-[(2S)-2-amino-2-carboxy-ethyl]-2-pyridyl]benzoic acid
  SITE 11: note = (S)-2-amino-5-methoxypentanoic acid
  SITE 13: note = (2R,4S)-4-aminopyrrolidine-2-carboxylic acid
  SITE 14: note = (2S,4R)-4-(4-(pyrimidin-5-yl)benzyl) pyrrolidine-2-carboxylic acid
XWFGPXDXGXXAPX

SEQ ID NO: 258 - protein, 14 aa, synthetic construct
  SITE 1: note (S)-2-(4-(2-amino-2-carboxyethyl)phenoxy)-N,N,N-trimethylet han-1-aminium
  SITE 3: note = 4-[(2S)-2-amino-2-carboxy-ethyl]benzoic acid
  SITE 5: note = (2S,4R)-4-aminopyrrolidine-2-carboxylic acid
  SITE 6: note = (2S,3S)-2-Amino-3-(3-chloronaphthalen-1-yl)butanoic acid
  SITE 8: note = D-N-methyl-Alanine
  SITE 10: note = 4-[4-[(2S)-2-amino-2-carboxy-ethyl]phenyl]benzoic acid
  SITE 11: note = (S)-2-amino-5-methoxypentanoic acid
  SITE 13: note = (2R,4S)-4-aminopyrrolidine-2-carboxylic acid
  SITE 14: note = (2S,4R)-4-(4-(pyrimidin-5-yl)benzyl) pyrrolidine-2-carboxylic acid
XWFGPXDXGXXAPX

SEQ ID NO: 259 - protein, 14 aa, synthetic construct
  SITE 1: note (S)-2-(4-(2-amino-2-carboxyethyl)phenoxy)-N,N,N-trimethylet han-1-aminium
  SITE 3: note = 4-[(2S)-2-amino-2-carboxy-ethyl]benzoic acid
  SITE 5: note = (2S,4R)-4-aminopyrrolidine-2-carboxylic acid
  SITE 6: note = (2S,3S)-2-Amino-3-(3-chloronaphthalen-1-yl)butanoic acid
  SITE 8: note = D-N-methyl-Alanine
  SITE 10: note 4-[5-[(2S)-2-amino-2-carboxy-ethyl]-2-pyridyl]benzoic acid
  SITE 11: note = (S)-2-amino-5-methoxypentanoic acid
  SITE 12: note = (S)-2-Aminopentanoic acid
  SITE 13: note = (2R,4S)-4-aminopyrrolidine-2-carboxylic acid
  SITE 14: note = (2S,4R)-4-(4-(pyrimidin-5-yl)benzyl) pyrrolidine-2-carboxylic acid
XWFGPXDXGXXXPX

SEQ ID NO: 260 - protein, 14 aa, synthetic construct
  SITE 1: note (S)-2-(4-(2-amino-2-carboxyethyl)phenoxy)-N,N,N-trimethylet han-1-aminium
  SITE 3: note = 4-[(2S)-2-amino-2-carboxy-ethyl]benzoic acid
  SITE 5: note = (2S,4R)-4-aminopyrrolidine-2-carboxylic acid
  SITE 6: note = (2S,3S)-2-Amino-3-(3-methylnaphthalen-1-yl)butanoic acid
  SITE 8: note = D-N-methyl-Alanine
  SITE 10: note = 4-[4-[(2S)-2-amino-2-carboxy-ethyl]phenyl]benzoic acid
  SITE 11: note = (S)-2-amino-5-methoxypentanoic acid
  SITE 12: note = (S)-2-Aminopentanoic acid
  SITE 13: note = (2R,4S)-4-aminopyrrolidine-2-carboxylic acid
  SITE 14: note = (2S,4R)-4-(4-(pyrimidin-5-yl)benzyl) pyrrolidine-2-carboxylic acid
XWFGPXDXGXXXPX

SEQ ID NO: 261 - protein, 14 aa, synthetic construct
  SITE 1: note (S)-2-(4-(2-amino-2-carboxyethyl)phenoxy)-N,N,N-trimethylet han-1-aminium
  SITE 3: note = 4-[(2S)-2-amino-2-carboxy-ethyl]benzoic acid
  SITE 5: note = (2S,4R)-4-aminopyrrolidine-2-carboxylic acid
  SITE 6: note = (2S,3S)-2-Amino-3-(3-chloronaphthalen-1-yl)butanoic acid
  SITE 8: note = D-N-methyl-Alanine
  SITE 10: note = 4-[4-[(2S)-2-amino-2-carboxy-ethyl]phenyl]benzoic acid
  SITE 11: note = (S)-2-amino-5-methoxypentanoic acid
  SITE 12: note = (S)-2-Aminopentanoic acid
  SITE 13: note = (2R,4S)-4-aminopyrrolidine-2-carboxylic acid
  SITE 14: note = (2S,4R)-4-(4-(pyrimidin-5-yl)benzyl) pyrrolidine-2-carboxylic acid
XWFGPXDXGXXXPX

SEQ ID NO: 262 - protein, 14 aa, synthetic construct
  SITE 1: note (2S)-3-[4-(2-acetamidoethoxy)phenyl]-2-amino-propanoic acid
  SITE 3: note = 4-[(2S)-2-amino-2-carboxy-ethyl]benzoic acid
  SITE 5: note = (2S,4R)-4-aminopyrrolidine-2-carboxylic acid
  SITE 6: note = (2S,3S)-2-Amino-3-(3-chloronaphthalen-1-yl)butanoic acid
  SITE 8: note = D-N-methyl-Alanine
  SITE 10: note = 4-[4-[(2S)-2-amino-2-carboxy-ethyl]phenyl]benzoic acid
  SITE 11: note = (S)-2-amino-5-methoxypentanoic acid
  SITE 12: note = (S)-2-Aminopentanoic acid
  SITE 13: note = (2R,4S)-4-aminopyrrolidine-2-carboxylic acid
  SITE 14: note = (2S,4R)-4-(4-(pyrimidin-5-yl)benzyl) pyrrolidine-2-carboxylic acid
XWFGPXDXGXXXPX

SEQ ID NO: 263 - protein, 14 aa, synthetic construct
  SITE 1: note (2S)-3-[4-(2-acetamidoethoxy)phenyl]-2-amino-propanoic acid
  SITE 3: note = 4-[(2S)-2-amino-2-carboxy-ethyl]benzoic acid
  SITE 5: note = (2S,4R)-4-aminopyrrolidine-2-carboxylic acid
  SITE 6: note = (2S,3S)-2-Amino-3-(3-chloronaphthalen-1-yl)butanoic acid
  SITE 8: note = D-N-methyl-Alanine
  SITE 10: note 4-[5-[(2S)-2-amino-2-carboxy-ethyl]-2-pyridyl]benzoic acid
  SITE 11: note (S)-21-Amino-21-carboxy-N,N,N-trimethyl-15-oxo-3,6,9,12-tet raoxa-16-azahenicosan-1-aminium
  SITE 12: note = (S)-2-Aminopentanoic acid
  SITE 13: note = (2R,4S)-4-hydroxypyrrolidine-2-carboxylic acid
  SITE 14: note = (2S,4R)-4-(4-(pyrimidin-5-yl)benzyl) pyrrolidine-2-carboxylic acid
XWFGPXDXGXXXXX

SEQ ID NO: 264 - protein, 14 aa, synthetic construct
  SITE 1: note (2S)-3-[4-(2-acetamidoethoxy)phenyl]-2-amino-propanoic acid
  SITE 3: note = 4-[(2S)-2-amino-2-carboxy-ethyl]benzoic acid
  SITE 5: note = (2S,4R)-4-aminopyrrolidine-2-carboxylic acid
  SITE 6: note = (2S,3S)-2-Amino-3-(3-chloronaphthalen-1-yl)butanoic acid
  SITE 8: note = D-N-methyl-Alanine
  SITE 10: note = 4-[4-[(2S)-2-amino-2-carboxy-ethyl]phenyl]benzoic acid
  SITE 11: note = (S)-4-Amino-4-carboxy-N,N,N-trimethylbutan-1-aminium
  SITE 13: note = (2R,4S)-4-hydroxypyrrolidine-2-carboxylic acid
  SITE 14: note = (2S,4R)-4-(4-(pyrimidin-5-yl)benzyl) pyrrolidine-2-carboxylic acid
XWFGPXDXGXXAXX

SEQ ID NO: 265 - protein, 14 aa, synthetic construct
  SITE 1: note (2S)-3-[4-(2-acetamidoethoxy)phenyl]-2-amino-propanoic acid
  SITE 3: note = (S)-2-Amino-3-(4-carbamoylphenyl)propanoic acid
  SITE 5: note = (2S,4R)-4-aminopyrrolidine-2-carboxylic acid
  SITE 6: note = (2S,3S)-2-Amino-3-(3-chloronaphthalen-1-yl)butanoic acid
  SITE 8: note = D-N-methyl-Alanine
  SITE 10: note = 4-[4-[(2S)-2-amino-2-carboxy-ethyl]phenyl]benzoic acid
  SITE 11: note (S)-2-(2-(3-((5-amino-5-carboxypentyl)amino)-3-oxopropoxy)e thoxy)-N,N,N-trimethylethan-1-aminium
  SITE 13: note = (2R,4S)-4-aminopyrrolidine-2-carboxylic acid
  SITE 14: note = (2S,4R)-4-(4-(pyrimidin-5-yl)benzyl) pyrrolidine-2-carboxylic acid
XWFGPXDXGXXAPX

SEQ ID NO: 266 - protein, 14 aa, synthetic construct
  SITE 1: note (2S)-3-[4-(2-acetamidoethoxy)phenyl]-2-amino-propanoic acid
  SITE 3: note = 4-[(2S)-2-amino-2-carboxy-ethyl]benzoic acid
  SITE 5: note = (2S,4R)-4-aminopyrrolidine-2-carboxylic acid
  SITE 6: note = (2S,3S)-2-Amino-3-(3-chloronaphthalen-1-yl)butanoic acid
  SITE 7: note = N4,N4-dimethyl-L-asparagine
  SITE 8: note = D-N-methyl-Alanine
  SITE 10: note = 4-[4-[(2S)-2-amino-2-carboxy-ethyl]phenyl]benzoic acid
  SITE 11: note (S)-2-(2-(3-((5-amino-5-carboxypentyl)amino)-3-oxopropoxy)e thoxy)-N,N,N-trimethylethan-1-aminium
  SITE 13: note = (2R,4S)-4-aminopyrrolidine-2-carboxylic acid
  SITE 14: note = (2S,4R)-4-(4-(pyrimidin-5-yl)benzyl) pyrrolidine-2-carboxylic acid
XWFGPXXXGXXAPX

SEQ ID NO: 267 - protein, 14 aa, synthetic construct
  SITE 1: note (2S)-3-[4-(2-acetamidoethoxy)phenyl]-2-amino-propanoic acid
  SITE 3: note = 4-[(2S)-2-amino-2-carboxy-ethyl]benzoic acid
  SITE 5: note = (2S,4R)-4-aminopyrrolidine-2-carboxylic acid
  SITE 6: note = (2S,3S)-2-Amino-3-(3-chloronaphthalen-1-yl)butanoic acid
  SITE 8: note = D-N-methyl-Alanine
  SITE 10: note = 4-[4-[(2S)-2-amino-2-carboxy-ethyl]phenyl]benzoic acid
  SITE 11: note (S)-2-(2-(3-((5-amino-5-carboxypentyl)amino)-3-oxopropoxy)e thoxy)-N,N,N-trimethylethan-1-aminium
  SITE 13: note = (2R,4S)-4-hydroxypyrrolidine-2-carboxylic acid
  SITE 14: note = (2S,4R)-4-(4-(pyrimidin-5-yl)benzyl) pyrrolidine-2-carboxylic acid
XWFGPXDXGXXAXX

SEQ ID NO: 268 - protein, 14 aa, synthetic construct
  SITE 1: note (2S)-3-[4-(2-acetamidoethoxy)phenyl]-2-amino-propanoic acid
  SITE 3: note = 4-[(2S)-2-amino-2-carboxy-ethyl]benzoic acid
  SITE 5: note = (2S,4R)-4-aminopyrrolidine-2-carboxylic acid
  SITE 6: note = (2S,3S)-2-Amino-3-(3-chloronaphthalen-1-yl)butanoic acid
  SITE 8: note = D-N-methyl-Alanine
  SITE 10: note (S)-2-Amino-3-(4-((1r,4S)-4-(tert-butoxycarbonyl)cyclohexyl )phenyl)propanoic acid
  SITE 11: note (S)-21-Amino-21-carboxy-N,N,N-trimethyl-15-oxo-3,6,9,12-tet raoxa-16-azahenicosan-1-aminium
  SITE 13: note = (2R,4S)-4-hydroxypyrrolidine-2-carboxylic acid
  SITE 14: note = (2S,4R)-4-(4-(pyrimidin-5-yl)benzyl) pyrrolidine-2-carboxylic acid
XWFGPXDXGXXAXX

SEQ ID NO: 269 - protein, 14 aa, synthetic construct
  SITE 1: note (2S)-3-[4-(2-acetamidoethoxy)phenyl]-2-amino-propanoic acid
  SITE 3: note = (S)-2-Amino-3-(4-carbamoylphenyl)propanoic acid
  SITE 5: note = (2S,4R)-4-aminopyrrolidine-2-carboxylic acid
  SITE 6: note = (2S,3S)-2-Amino-3-(3-chloronaphthalen-1-yl)butanoic acid
  SITE 8: note = D-N-methyl-Alanine
  SITE 10: note = 4-[4-[(2S)-2-amino-2-carboxy-ethyl]phenyl]benzoic acid
  SITE 11: note (S)-21-Amino-21-carboxy-N,N,N-trimethyl-15-oxo-3,6,9,12-tet raoxa-16-azahenicosan-1-aminium
  SITE 13: note = (2R,4S)-4-aminopyrrolidine-2-carboxylic acid
  SITE 14: note = (2S,4R)-4-(4-(pyrimidin-5-yl)benzyl) pyrrolidine-2-carboxylic acid
XWFGPXDXGXXAPX

SEQ ID NO: 270 - protein, 14 aa, synthetic construct
  SITE 1: note (2S)-3-[4-(2-acetamidoethoxy)phenyl]-2-amino-propanoic acid
  SITE 3: note = 4-[(2S)-2-amino-2-carboxy-ethyl]benzoic acid
  SITE 5: note = (2S,4R)-4-aminopyrrolidine-2-carboxylic acid
  SITE 6: note = (2S,3S)-2-Amino-3-(3-chloronaphthalen-1-yl)butanoic acid
  SITE 7: note = N4,N4-dimethyl-L-asparagine
  SITE 8: note = D-N-methyl-Alanine
  SITE 10: note = 4-[4-[(2S)-2-amino-2-carboxy-ethyl]phenyl]benzoic acid
  SITE 11: note (S)-21-Amino-21-carboxy-N,N,N-trimethyl-15-oxo-3,6,9,12-tet raoxa-16-azahenicosan-1-aminium
  SITE 13: note = (2R,4S)-4-aminopyrrolidine-2-carboxylic acid
  SITE 14: note = (2S,4R)-4-(4-(pyrimidin-5-yl)benzyl) pyrrolidine-2-carboxylic acid
XWFGPXXXGXXAPX

SEQ ID NO: 271 - protein, 14 aa, synthetic construct
  SITE 1: note (2S)-3-[4-(2-acetamidoethoxy)phenyl]-2-amino-propanoic acid
  SITE 3: note = 4-[(2S)-2-amino-2-carboxy-ethyl]benzoic acid
  SITE 5: note = (2S,4R)-4-aminopyrrolidine-2-carboxylic acid
  SITE 6: note = (2S,3S)-2-Amino-3-(3-chloronaphthalen-1-yl)butanoic acid
  SITE 8: note = D-N-methyl-Alanine
  SITE 10: note = 4-[4-[(2S)-2-amino-2-carboxy-ethyl]phenyl]benzoic acid
  SITE 11: note (S)-21-Amino-21-carboxy-N,N,N-trimethyl-15-oxo-3,6,9,12-tet raoxa-16-azahenicosan-1-aminium
  SITE 13: note = (2R,4S)-4-hydroxypyrrolidine-2-carboxylic acid
  SITE 14: note = (2S,4R)-4-(4-(pyrimidin-5-yl)benzyl) pyrrolidine-2-carboxylic acid
XWFGPXDXGXXAXX

SEQ ID NO: 272 - protein, 14 aa, synthetic construct
  SITE 1: note (2S)-3-[4-(2-acetamidoethoxy)phenyl]-2-amino-propanoic acid
  SITE 3: note = (S)-2-Amino-3-(4-carbamoylphenyl)propanoic acid
  SITE 5: note = (2S,4R)-4-aminopyrrolidine-2-carboxylic acid
  SITE 6: note = (2S,3S)-2-Amino-3-(3-chloronaphthalen-1-yl)butanoic acid
  SITE 7: note = N4,N4-dimethyl-L-asparagine
  SITE 8: note = D-N-methyl-Alanine
  SITE 10: note 4-[5-[(2S)-2-amino-2-carboxy-ethyl]-2-pyridyl]benzoic acid
  SITE 11: note (S)-21-Amino-21-carboxy-N,N,N-trimethyl-15-oxo-3,6,9,12-tet raoxa-16-azahenicosan-1-aminium
  SITE 13: note = (2R,4S)-4-hydroxypyrrolidine-2-carboxylic acid
  SITE 14: note = (2S,4R)-4-(4-(pyrimidin-5-yl)benzyl) pyrrolidine-2-carboxylic acid
XWFGPXXXGXXAXX

SEQ ID NO: 273 - protein, 14 aa, synthetic construct
  SITE 1: note (2S)-3-[4-(2-acetamidoethoxy)phenyl]-2-amino-propanoic acid
  SITE 3: note = (S)-2-Amino-3-(4-carbamoylphenyl)propanoic acid
  SITE 5: note = (2S,4R)-4-aminopyrrolidine-2-carboxylic acid
  SITE 6: note = (2S,3S)-2-Amino-3-(3-chloronaphthalen-1-yl)butanoic acid
  SITE 8: note = D-N-methyl-Alanine
  SITE 10: note (S)-2-Amino-3-(4-((1r,4S)-4-(tert-butoxycarbonyl)cyclohexyl )phenyl)propanoic acid
  SITE 11: note (S)-21-Amino-21-carboxy-N,N,N-trimethyl-15-oxo-3,6,9,12-tet raoxa-16-azahenicosan-1-aminium
  SITE 13: note = (2R,4S)-4-hydroxypyrrolidine-2-carboxylic acid
  SITE 14: note = (2S,4R)-4-(4-(pyrimidin-5-yl)benzyl) pyrrolidine-2-carboxylic acid
XWFGPXDXGXXAXX

SEQ ID NO: 274 - protein, 14 aa, synthetic construct
  SITE 1: note (2S)-3-[4-(2-acetamidoethoxy)phenyl]-2-amino-propanoic acid
  SITE 3: note = 4-[(2S)-2-amino-2-carboxy-ethyl]benzoic acid
  SITE 5: note = (2S,4R)-4-aminopyrrolidine-2-carboxylic acid
  SITE 6: note = (2S,3S)-2-Amino-3-(3-chloronaphthalen-1-yl)butanoic acid
  SITE 7: note = N4,N4-dimethyl-L-asparagine
  SITE 8: note = D-N-methyl-Alanine
  SITE 10: note (S)-2-Amino-3-(4-((1r,4S)-4-(tert-butoxycarbonyl)cyclohexyl )phenyl)propanoic acid
  SITE 11: note (S)-21-Amino-21-carboxy-N,N,N-trimethyl-15-oxo-3,6,9,12-tet raoxa-16-azahenicosan-1-aminium
  SITE 13: note = (2R,4S)-4-hydroxypyrrolidine-2-carboxylic acid
  SITE 14: note = (2S,4R)-4-(4-(pyrimidin-5-yl)benzyl) pyrrolidine-2-carboxylic acid
XWFGPXXXGXXAXX

SEQ ID NO: 275 - protein, 14 aa, synthetic construct
  SITE 1: note (2S)-3-[4-(2-acetamidoethoxy)phenyl]-2-amino-propanoic acid
  SITE 3: note = (S)-2-Amino-3-(4-carbamoylphenyl)propanoic acid
  SITE 5: note = (2S,4R)-4-aminopyrrolidine-2-carboxylic acid
  SITE 6: note = (2S,3S)-2-Amino-3-(3-chloronaphthalen-1-yl)butanoic acid
  SITE 8: note = D-N-methyl-Alanine
  SITE 10: note = 4-[4-[(2S)-2-amino-2-carboxy-ethyl]phenyl]benzoic acid
  SITE 11: note (S)-21-Amino-21-carboxy-N,N,N-trimethyl-15-oxo-3,6,9,12-tet raoxa-16-azahenicosan-1-aminium
  SITE 13: note = (2R,4S)-4-hydroxypyrrolidine-2-carboxylic acid
  SITE 14: note = (2S,4R)-4-(4-(pyrimidin-5-yl)benzyl) pyrrolidine-2-carboxylic acid
XWFGPXDXGXXAXX

SEQ ID NO: 276 - protein, 14 aa, synthetic construct
  SITE 1: note (2S)-3-[4-(2-acetamidoethoxy)phenyl]-2-amino-propanoic acid
  SITE 3: note = 4-[(2S)-2-amino-2-carboxy-ethyl]benzoic acid
  SITE 5: note = (2S,4R)-4-aminopyrrolidine-2-carboxylic acid
  SITE 6: note = (2S,3S)-2-Amino-3-(3-chloronaphthalen-1-yl)butanoic acid
  SITE 7: note = N4,N4-dimethyl-L-asparagine
  SITE 8: note = D-N-methyl-Alanine
  SITE 10: note = 4-[4-[(2S)-2-amino-2-carboxy-ethyl]phenyl]benzoic acid
  SITE 11: note (S)-21-Amino-21-carboxy-N,N,N-trimethyl-15-oxo-3,6,9,12-tet raoxa-16-azahenicosan-1-aminium
  SITE 13: note = (2R,4S)-4-hydroxypyrrolidine-2-carboxylic acid
  SITE 14: note = (2S,4R)-4-(4-(pyrimidin-5-yl)benzyl) pyrrolidine-2-carboxylic acid
XWFGPXXXGXXAXX

SEQ ID NO: 277 - protein, 14 aa, synthetic construct
  SITE 1: note (2S)-3-[4-(2-acetamidoethoxy)phenyl]-2-amino-propanoic acid
  SITE 3: note = 4-[(2S)-2-amino-2-carboxy-ethyl]benzoic acid
  SITE 5: note = (2S,4R)-4-aminopyrrolidine-2-carboxylic acid
  SITE 6: note = (2S,3S)-2-Amino-3-(3-chloronaphthalen-1-yl)butanoic acid
  SITE 8: note = (R)-piperidine-2-carboxylic acid
  SITE 10: note = 4-[4-[(2S)-2-amino-2-carboxy-ethyl]phenyl]benzoic acid
  SITE 11: note (S)-21-Amino-21-carboxy-N,N,N-trimethyl-15-oxo-3,6,9,12-tet raoxa-16-azahenicosan-1-aminium
  SITE 13: note = (2R,4S)-4-aminopyrrolidine-2-carboxylic acid
  SITE 14: note = (2S,4R)-4-(4-(pyrimidin-5-yl)benzyl) pyrrolidine-2-carboxylic acid
XWFGPXDXGXXAPX

SEQ ID NO: 278 - protein, 14 aa, synthetic construct
  SITE 1: note (2S)-3-[4-(2-acetamidoethoxy)phenyl]-2-amino-propanoic acid
  SITE 3: note (S)-2-Amino-3-(4-(5-oxo-4,5-dihydro-1,2,4-oxadiazol-3-yl)ph enyl)propanoic acid
  SITE 5: note = (2S,4R)-4-aminopyrrolidine-2-carboxylic acid
  SITE 6: note = (2S,3S)-2-Amino-3-(3-chloronaphthalen-1-yl)butanoic acid
  SITE 8: note = D-N-methyl-Alanine
  SITE 10: note = 4-[4-[(2S)-2-amino-2-carboxy-ethyl]phenyl]benzoic acid
  SITE 11: note (S)-21-Amino-21-carboxy-N,N,N-trimethyl-15-oxo-3,6,9,12-tet raoxa-16-azahenicosan-1-aminium
  SITE 13: note = (2R,4S)-4-hydroxypyrrolidine-2-carboxylic acid
  SITE 14: note = (2S,4R)-4-(4-(pyrimidin-5-yl)benzyl) pyrrolidine-2-carboxylic acid
XWXGPXDXGXXAXX

SEQ ID NO: 279 - protein, 14 aa, synthetic construct
  SITE 1: note (2S)-3-[4-(2-acetamidoethoxy)phenyl]-2-amino-propanoic acid
  SITE 3: note (S)-2-Amino-3-(4-(5-oxo-4,5-dihydro-1,2,4-oxadiazol-3-yl)ph enyl)propanoic acid
  SITE 5: note = (2S,4R)-4-aminopyrrolidine-2-carboxylic acid
  SITE 6: note = (2S,3S)-2-Amino-3-(3-chloronaphthalen-1-yl)butanoic acid
  SITE 8: note = D-N-methyl-Alanine
  SITE 10: note 4-[5-[(2S)-2-amino-2-carboxy-ethyl]-2-pyridyl]benzoic acid
  SITE 11: note (S)-21-Amino-21-carboxy-N,N,N-trimethyl-15-oxo-3,6,9,12-tet raoxa-16-azahenicosan-1-aminium
  SITE 13: note = (2R,4S)-4-hydroxypyrrolidine-2-carboxylic acid
  SITE 14: note = (2S,4R)-4-(4-(pyrimidin-5-yl)benzyl) pyrrolidine-2-carboxylic acid
XWXGPXDXGXXAXX

SEQ ID NO: 280 - protein, 14 aa, synthetic construct
  SITE 1: note (2S)-3-[4-(2-acetamidoethoxy)phenyl]-2-amino-propanoic acid
  SITE 3: note (S)-2-Amino-3-(4-(5-oxo-4,5-dihydro-1,2,4-oxadiazol-3-yl)ph enyl)propanoic acid
  SITE 5: note = (2S,4R)-4-aminopyrrolidine-2-carboxylic acid
  SITE 6: note = (2S,3S)-2-Amino-3-(3-chloronaphthalen-1-yl)butanoic acid
  SITE 8: note = D-N-methyl-Alanine
  SITE 10: note = 4-[4-[(2S)-2-amino-2-carboxy-ethyl]phenyl]benzoic acid
  SITE 11: note (S)-21-Amino-21-carboxy-N,N,N-trimethyl-15-oxo-3,6,9,12-tet raoxa-16-azahenicosan-1-aminium
  SITE 13: note = (2R,4S)-4-aminopyrrolidine-2-carboxylic acid
  SITE 14: note = (2S,4R)-4-(4-(pyrimidin-5-yl)benzyl) pyrrolidine-2-carboxylic acid
XWXGPXDXGXXAPX

SEQ ID NO: 281 - protein, 14 aa, synthetic construct
  SITE 1: note (2S)-3-[4-(2-acetamidoethoxy)phenyl]-2-amino-propanoic acid
  SITE 3: note (S)-2-Amino-3-(4-(5-oxo-4,5-dihydro-1,2,4-oxadiazol-3-yl)ph enyl)propanoic acid
  SITE 5: note = (2S,4R)-4-aminopyrrolidine-2-carboxylic acid
  SITE 6: note = (2S,3S)-2-Amino-3-(3-chloronaphthalen-1-yl)butanoic acid
  SITE 8: note = D-N-methyl-Alanine
  SITE 10: note = 4-[4-[(2S)-2-amino-2-carboxy-ethyl]phenyl]benzoic acid
  SITE 11: note (S)-21-Amino-21-carboxy-N,N,N-trimethyl-15-oxo-3,6,9,12-tet raoxa-16-azahenicosan-1-aminium
  SITE 13: note = (2R,4S)-4-hydroxypyrrolidine-2-carboxylic acid
  SITE 14: note (2S,4R)-4-(pyrimidin-5-ylmethyl)pyrrolidine-2-carboxylic acid
XWXGPXDXGXXAXX

SEQ ID NO: 282 - protein, 14 aa, synthetic construct
  SITE 1: note (2S)-3-[4-(2-acetamidoethoxy)phenyl]-2-amino-propanoic acid
  SITE 3: note = 4-[(2S)-2-amino-2-carboxy-ethyl]benzoic acid
  SITE 5: note = (2S,4R)-4-aminopyrrolidine-2-carboxylic acid
  SITE 6: note = (2S,3S)-2-Amino-3-(3-chloronaphthalen-1-yl)butanoic acid
  SITE 8: note = (R)-piperidine-2-carboxylic acid
  SITE 10: note 4-[5-[(2S)-2-amino-2-carboxy-ethyl]-2-pyridyl]benzoic acid
  SITE 11: note (S)-21-Amino-21-carboxy-N,N,N-trimethyl-15-oxo-3,6,9,12-tet raoxa-16-azahenicosan-1-aminium
  SITE 13: note = (2R,4S)-4-hydroxypyrrolidine-2-carboxylic acid
  SITE 14: note = (2S,4R)-4-(4-(pyrimidin-5-yl)benzyl) pyrrolidine-2-carboxylic acid
XWFGPXDXGXXAXX

SEQ ID NO: 283 - protein, 14 aa, synthetic construct
  SITE 1: note (2S)-3-[4-(2-acetamidoethoxy)phenyl]-2-amino-propanoic acid
  SITE 3: note = 4-[(2S)-2-amino-2-carboxy-ethyl]benzoic acid
  SITE 5: note = (2S,4R)-4-aminopyrrolidine-2-carboxylic acid
  SITE 6: note = (2S,3S)-2-Amino-3-(3-chloronaphthalen-1-yl)butanoic acid
  SITE 8: note = D-N-methyl-Alanine
  SITE 10: note 4-[5-[(2S)-2-amino-2-carboxy-ethyl]-2-pyridyl]benzoic acid
  SITE 11: note = (S)-4-Amino-4-carboxy-N,N,N-trimethylbutan-1-aminium
  SITE 13: note = (2R,4S)-4-hydroxypyrrolidine-2-carboxylic acid
  SITE 14: note = (2S,4R)-4-(4-(pyrimidin-5-yl)benzyl) pyrrolidine-2-carboxylic acid
XWFGPXDXGXXAXX

SEQ ID NO: 284 - protein, 14 aa, synthetic construct
  SITE 1: note (2S)-3-[4-(2-acetamidoethoxy)phenyl]-2-amino-propanoic acid
  SITE 3: note = 4-[(2S)-2-amino-2-carboxy-ethyl]benzoic acid
  SITE 5: note = (2S,4R)-4-aminopyrrolidine-2-carboxylic acid
  SITE 6: note = (2S,3S)-2-Amino-3-(3-chloronaphthalen-1-yl)butanoic acid
  SITE 8: note = D-N-methyl-Alanine
  SITE 10: note = 4-[4-[(2S)-2-amino-2-carboxy-ethyl]phenyl]benzoic acid
  SITE 12: note (S)-21-Amino-21-carboxy-N,N,N-trimethyl-15-oxo-3,6,9,12-tet raoxa-16-azahenicosan-1-aminium
  SITE 13: note = (2R,4S)-4-hydroxypyrrolidine-2-carboxylic acid
  SITE 14: note = (2S,4R)-4-(4-(pyrimidin-5-yl)benzyl) pyrrolidine-2-carboxylic acid
XWFGPXDXGXAXXX

SEQ ID NO: 285 - protein, 14 aa, synthetic construct
  SITE 1: note (2S)-3-[4-(2-acetamidoethoxy)phenyl]-2-amino-propanoic acid
  SITE 3: note = 4-[(2S)-2-amino-2-carboxy-ethyl]benzoic acid
  SITE 5: note = (2S,4R)-4-aminopyrrolidine-2-carboxylic acid
  SITE 6: note = (2S,3S)-2-Amino-3-(3-chloronaphthalen-1-yl)butanoic acid
  SITE 7: note = N4,N4-dimethyl-L-asparagine
  SITE 8: note = D-N-methyl-Alanine
  SITE 10: note = 4-[4-[(2S)-2-amino-2-carboxy-ethyl]phenyl]benzoic acid
  SITE 12: note (S)-21-Amino-21-carboxy-N,N,N-trimethyl-15-oxo-3,6,9,12-tet raoxa-16-azahenicosan-1-aminium
  SITE 13: note = (2R,4S)-4-aminopyrrolidine-2-carboxylic acid
  SITE 14: note = (2S,4R)-4-(4-(pyrimidin-5-yl)benzyl) pyrrolidine-2-carboxylic acid
XWFGPXXXGXAXPX

SEQ ID NO: 286 - protein, 14 aa, synthetic construct
  SITE 1: note (2S)-3-[4-(2-acetamidoethoxy)phenyl]-2-amino-propanoic acid
  SITE 3: note = (S)-2-Amino-3-(4-carbamoylphenyl)propanoic acid
  SITE 5: note = (2S,4R)-4-aminopyrrolidine-2-carboxylic acid
  SITE 6: note = (2S,3S)-2-Amino-3-(3-chloronaphthalen-1-yl)butanoic acid
  SITE 8: note = D-N-methyl-Alanine
  SITE 10: note = 4-[4-[(2S)-2-amino-2-carboxy-ethyl]phenyl]benzoic acid
  SITE 12: note (S)-2-(2-(3-((5-amino-5-carboxypentyl)amino)-3-oxopropoxy)e thoxy)-N,N,N-trimethylethan-1-aminium
  SITE 13: note = (2R,4S)-4-aminopyrrolidine-2-carboxylic acid
  SITE 14: note = (2S,4R)-4-(4-(pyrimidin-5-yl)benzyl) pyrrolidine-2-carboxylic acid
XWFGPXDXGXAXPX

SEQ ID NO: 287 - protein, 14 aa, synthetic construct
  SITE 1: note (2S)-3-[4-(2-acetamidoethoxy)phenyl]-2-amino-propanoic acid
  SITE 3: note = (S)-2-Amino-3-(4-carbamoylphenyl)propanoic acid
  SITE 5: note = (2S,4R)-4-aminopyrrolidine-2-carboxylic acid
  SITE 6: note = (2S,3S)-2-Amino-3-(3-chloronaphthalen-1-yl)butanoic acid
  SITE 7: note = N4,N4-dimethyl-L-asparagine
  SITE 8: note = D-N-methyl-Alanine
  SITE 10: note = 4-[4-[(2S)-2-amino-2-carboxy-ethyl]phenyl]benzoic acid
  SITE 11: note (S)-21-Amino-21-carboxy-N,N,N-trimethyl-15-oxo-3,6,9,12-tet raoxa-16-azahenicosan-1-aminium
  SITE 13: note = (2R,4S)-4-hydroxypyrrolidine-2-carboxylic acid
  SITE 14: note (2S,4R)-4-(pyrimidin-5-ylmethyl)pyrrolidine-2-carboxylic acid
XWFGPXXXGXXAXX

SEQ ID NO: 288 - protein, 14 aa, synthetic construct
  SITE 1: note (2S)-3-[4-(2-acetamidoethoxy)phenyl]-2-amino-propanoic acid
  SITE 3: note = 4-[(2S)-2-amino-2-carboxy-ethyl]benzoic acid
  SITE 5: note = (2S,4R)-4-aminopyrrolidine-2-carboxylic acid
  SITE 6: note = (2S,3S)-2-Amino-3-(3-chloronaphthalen-1-yl)butanoic acid
  SITE 7: note = N4,N4-dimethyl-L-asparagine
  SITE 8: note = D-N-methyl-Alanine
  SITE 10: note = 4-[4-[(2S)-2-amino-2-carboxy-ethyl]phenyl]benzoic acid
  SITE 11: note (S)-21-Amino-21-carboxy-N,N,N-trimethyl-15-oxo-3,6,9,12-tet raoxa-16-azahenicosan-1-aminium
  SITE 13: note = (2R,4S)-4-hydroxypyrrolidine-2-carboxylic acid
  SITE 14: note (2S,4R)-4-(pyrimidin-5-ylmethyl)pyrrolidine-2-carboxylic acid
XWFGPXXXGXXAXX

SEQ ID NO: 289 - protein, 14 aa, synthetic construct
  SITE 1: note (2S)-3-[4-(2-acetamidoethoxy)phenyl]-2-amino-propanoic acid
  SITE 3: note = (S)-2-Amino-3-(4-carbamoylphenyl)propanoic acid
  SITE 5: note = (2S,4R)-4-aminopyrrolidine-2-carboxylic acid
  SITE 6: note = (2S,3S)-2-Amino-3-(3-chloronaphthalen-1-yl)butanoic acid
  SITE 8: note = D-N-methyl-Alanine
  SITE 10: note = 4-[4-[(2S)-2-amino-2-carboxy-ethyl]phenyl]benzoic acid
  SITE 11: note (S)-21-Amino-21-carboxy-N,N,N-trimethyl-15-oxo-3,6,9,12-tet raoxa-16-azahenicosan-1-aminium
  SITE 13: note = (2R,4S)-4-hydroxypyrrolidine-2-carboxylic acid
  SITE 14: note (2S,4R)-4-(pyrimidin-5-ylmethyl)pyrrolidine-2-carboxylic acid
XWFGPXDXGXXAXX

SEQ ID NO: 290 - protein, 14 aa, synthetic construct
  SITE 1: note (2S)-3-[4-(2-acetamidoethoxy)phenyl]-2-amino-propanoic acid
  SITE 3: note (S)-2-Amino-3-(4-(5-methyl-1,2,4-oxadiazol-3-yl)phenyl)prop anoic acid
  SITE 5: note = (2S,4R)-4-aminopyrrolidine-2-carboxylic acid
  SITE 6: note = (2S,3S)-2-amino-3-(1-naphthyl)butanoic acid
  SITE 8: note = D-N-methyl-Alanine
  SITE 10: note = 4-[4-[(2S)-2-amino-2-carboxy-ethyl]phenyl]benzoic acid
  SITE 11: note = (S)-2-amino-5-methoxypentanoic acid
  SITE 12: note = (S)-2-Aminopentanoic acid
  SITE 13: note = (2R,4S)-4-aminopyrrolidine-2-carboxylic acid
  SITE 14: note = (2S,4R)-4-(4-(pyrimidin-5-yl)benzyl) pyrrolidine-2-carboxylic acid
XWXGPXDXGXXXPX

SEQ ID NO: 291 - protein, 14 aa, synthetic construct
  SITE 1: note (2S)-3-[4-(2-acetamidoethoxy)phenyl]-2-amino-propanoic acid
  SITE 3: note (S)-2-Amino-3-(4-(5-(ethoxymethyl)-1,2,4-oxadiazol-3-yl)phe nyl)propanoic acid
  SITE 5: note = (2S,4R)-4-aminopyrrolidine-2-carboxylic acid
  SITE 6: note = (2S,3S)-2-amino-3-(1-naphthyl)butanoic acid
  SITE 8: note = D-N-methyl-Alanine
  SITE 10: note = 4-[4-[(2S)-2-amino-2-carboxy-ethyl]phenyl]benzoic acid
  SITE 11: note = (S)-2-amino-5-methoxypentanoic acid
  SITE 12: note = (S)-2-Aminopentanoic acid
  SITE 13: note = (2R,4S)-4-aminopyrrolidine-2-carboxylic acid
  SITE 14: note = (2S,4R)-4-(4-(pyrimidin-5-yl)benzyl) pyrrolidine-2-carboxylic acid
XWXGPXDXGXXXPX

SEQ ID NO: 292 - protein, 14 aa, synthetic construct
  SITE 1: note (S)-2-Amino-3-(4-(5-methyl-1,2,4-oxadiazol-3-yl)phenyl)prop anoic acid
  SITE 3: note = 4-[(2S)-2-amino-2-carboxy-ethyl]benzoic acid
  SITE 5: note = (2S,4R)-4-aminopyrrolidine-2-carboxylic acid
  SITE 6: note = (2S,3S)-2-amino-3-(1-naphthyl)butanoic acid
  SITE 8: note = D-N-methyl-Alanine
  SITE 10: note = 4-[4-[(2S)-2-amino-2-carboxy-ethyl]phenyl]benzoic acid
  SITE 11: note = (S)-2-amino-5-methoxypentanoic acid
  SITE 12: note = (S)-2-Aminopentanoic acid
  SITE 13: note = (2R,4S)-4-aminopyrrolidine-2-carboxylic acid
  SITE 14: note = (2S,4R)-4-(4-(pyrimidin-5-yl)benzyl) pyrrolidine-2-carboxylic acid
XWFGPXDXGXXXPX

SEQ ID NO: 293 - protein, 14 aa, synthetic construct
  SITE 1: note (S)-2-Amino-3-(4-(5-(ethoxymethyl)-1,2,4-oxadiazol-3-yl)phe nyl)propanoic acid
  SITE 3: note = 4-[(2S)-2-amino-2-carboxy-ethyl]benzoic acid
  SITE 5: note = (2S,4R)-4-aminopyrrolidine-2-carboxylic acid
  SITE 6: note = (2S,3S)-2-amino-3-(1-naphthyl)butanoic acid
  SITE 8: note = D-N-methyl-Alanine
  SITE 10: note = 4-[4-[(2S)-2-amino-2-carboxy-ethyl]phenyl]benzoic acid
  SITE 11: note = (S)-2-amino-5-methoxypentanoic acid
  SITE 12: note = (S)-2-Aminopentanoic acid
  SITE 13: note = (2R,4S)-4-aminopyrrolidine-2-carboxylic acid
  SITE 14: note = (2S,4R)-4-(4-(pyrimidin-5-yl)benzyl) pyrrolidine-2-carboxylic acid
XWFGPXDXGXXXPX

SEQ ID NO: 294 - protein, 14 aa, synthetic construct
  SITE 1: note (2S)-3-[4-(2-acetamidoethoxy)phenyl]-2-amino-propanoic acid
  SITE 3: note = 4-[(2S)-2-amino-2-carboxy-ethyl]benzoic acid
  SITE 5: note = (2S,4R)-4-aminopyrrolidine-2-carboxylic acid
  SITE 6: note = (2S,3S)-2-amino-3-(1-naphthyl)butanoic acid
  SITE 8: note = D-N-methyl-Alanine
  SITE 10: note = 4-[4-[(2S)-2-amino-2-carboxy-ethyl]phenyl]benzoic acid
  SITE 11: note (S)-21-Amino-21-carboxy-N,N,N-trimethyl-15-oxo-3,6,9,12-tet raoxa-16-azahenicosan-1-aminium
  SITE 12: note = (S)-2-Aminopentanoic acid
  SITE 13: note = (2R,4S)-4-aminopyrrolidine-2-carboxylic acid
  SITE 14: note = (2S,4R)-4-(4-(pyrimidin-5-yl)benzyl) pyrrolidine-2-carboxylic acid
XWFGPXDXGXXXPX

SEQ ID NO: 295 - protein, 14 aa, synthetic construct
  SITE 1: note (2S)-3-[4-(2-acetamidoethoxy)phenyl]-2-amino-propanoic acid
  SITE 3: note = 4-[(2S)-2-amino-2-carboxy-ethyl]benzoic acid
  SITE 5: note = (2S,4R)-4-aminopyrrolidine-2-carboxylic acid
  SITE 6: note = (2S,3S)-2-amino-3-(1-naphthyl)butanoic acid
  SITE 8: note = D-N-methyl-Alanine
  SITE 10: note = 4-[4-[(2S)-2-amino-2-carboxy-ethyl]phenyl]benzoic acid
  SITE 11: note (S)-2-(2-(3-((5-amino-5-carboxypentyl)amino)-3-oxopropoxy)e thoxy)-N,N,N-trimethylethan-1-aminium
  SITE 12: note = (S)-2-Aminopentanoic acid
  SITE 13: note = (2R,4S)-4-aminopyrrolidine-2-carboxylic acid
  SITE 14: note = (2S,4R)-4-(4-(pyrimidin-5-yl)benzyl) pyrrolidine-2-carboxylic acid
XWFGPXDXGXXXPX

SEQ ID NO: 296 - protein, 14 aa, synthetic construct
  SITE 1: note (S)-2-Amino-3-(4-((pyrrolidine-1-carbonyl)oxy)phenyl)propan oic acid
  SITE 3: note (S)-2-Amino-3-(4-(5-methyl-1,2,4-oxadiazol-3-yl)phenyl)prop anoic acid
  SITE 5: note = (2S,4R)-4-aminopyrrolidine-2-carboxylic acid
  SITE 6: note = (2S,3S)-2-amino-3-(1-naphthyl)butanoic acid
  SITE 8: note = D-N-methyl-Alanine
  SITE 10: note = 4-[4-[(2S)-2-amino-2-carboxy-ethyl]phenyl]benzoic acid
  SITE 11: note = (S)-2-amino-5-methoxypentanoic acid
  SITE 12: note = (S)-2-Aminopentanoic acid
  SITE 13: note = (2R,4S)-4-aminopyrrolidine-2-carboxylic acid
  SITE 14: note = (2S,4R)-4-(4-(pyrimidin-5-yl)benzyl) pyrrolidine-2-carboxylic acid
XWXGPXDXGXXXPX

SEQ ID NO: 297 - protein, 14 aa, synthetic construct
  SITE 1: note (S)-2-Amino-3-(4-((pyrrolidine-1-carbonyl)oxy)phenyl)propan oic acid
  SITE 3: note = 4-[(2S)-2-amino-2-carboxy-ethyl]benzoic acid
  SITE 5: note = (2S,4R)-4-aminopyrrolidine-2-carboxylic acid
  SITE 6: note = (2S,3S)-2-amino-3-(1-naphthyl)butanoic acid
  SITE 8: note = D-N-methyl-Alanine
  SITE 10: note = 4-[4-[(2S)-2-amino-2-carboxy-ethyl]phenyl]benzoic acid
  SITE 11: note = (S)-2-amino-5-methoxypentanoic acid
  SITE 12: note = (S)-2-Aminopentanoic acid
  SITE 13: note = (2R,4S)-4-aminopyrrolidine-2-carboxylic acid
  SITE 14: note = (2S,4R)-4-(4-(pyrimidin-5-yl)benzyl) pyrrolidine-2-carboxylic acid
XWFGPXDXGXXXPX

SEQ ID NO: 298 - protein, 14 aa, synthetic construct
  SITE 1: note (S)-2-Amino-3-(4-(5-methyl-1,2,4-oxadiazol-3-yl)phenyl)prop anoic acid
  SITE 3: note = 4-[(2S)-2-amino-2-carboxy-ethyl]benzoic acid
  SITE 5: note = (2S,4R)-4-aminopyrrolidine-2-carboxylic acid
  SITE 6: note = (2S,3S)-2-amino-3-(1-naphthyl)butanoic acid
  SITE 7: note (S)-2-Amino-3-(5-(methoxymethyl)-1,2,4-oxadiazol-3-yl)propa noic acid
  SITE 8: note = D-N-methyl-Alanine
  SITE 10: note = 4-[4-[(2S)-2-amino-2-carboxy-ethyl]phenyl]benzoic acid
  SITE 11: note = (S)-2-amino-5-methoxypentanoic acid
  SITE 12: note = (S)-2-Aminopentanoic acid
  SITE 13: note = (2R,4S)-4-aminopyrrolidine-2-carboxylic acid
  SITE 14: note = (2S,4R)-4-(4-(pyrimidin-5-yl)benzyl) pyrrolidine-2-carboxylic acid
XWFGPXXXGXXXPX

SEQ ID NO: 299 - protein, 14 aa, synthetic construct
  SITE 1: note (S)-2-Amino-3-(4-(5-(ethoxymethyl)-1,2,4-oxadiazol-3-yl)phe nyl)propanoic acid
  SITE 3: note (S)-2-Amino-3-(4-(5-methyl-1,2,4-oxadiazol-3-yl)phenyl)prop anoic acid
  SITE 5: note = (2S,4R)-4-aminopyrrolidine-2-carboxylic acid
  SITE 6: note = (2S,3S)-2-amino-3-(1-naphthyl)butanoic acid
  SITE 8: note = D-N-methyl-Alanine
  SITE 10: note = 4-[4-[(2S)-2-amino-2-carboxy-ethyl]phenyl]benzoic acid
  SITE 11: note = (S)-2-amino-5-methoxypentanoic acid
  SITE 12: note = (S)-2-Aminopentanoic acid
  SITE 13: note = (2R,4S)-4-aminopyrrolidine-2-carboxylic acid
  SITE 14: note = (2S,4R)-4-(4-(pyrimidin-5-yl)benzyl) pyrrolidine-2-carboxylic acid
XWXGPXDXGXXXPX

SEQ ID NO: 300 - protein, 14 aa, synthetic construct
  SITE 1: note (S)-2-Amino-3-(4-(5-methyl-1,2,4-oxadiazol-3-yl)phenyl)prop anoic acid
  SITE 3: note (S)-2-Amino-3-(4-(5-methyl-1,2,4-oxadiazol-3-yl)phenyl)prop anoic acid
  SITE 5: note = (2S,4R)-4-aminopyrrolidine-2-carboxylic acid
  SITE 6: note = (2S,3S)-2-amino-3-(1-naphthyl)butanoic acid
  SITE 8: note = D-N-methyl-Alanine
  SITE 10: note = 4-[4-[(2S)-2-amino-2-carboxy-ethyl]phenyl]benzoic acid
  SITE 11: note = (S)-2-amino-5-methoxypentanoic acid
  SITE 12: note = (S)-2-Aminopentanoic acid
  SITE 13: note = (2R,4S)-4-aminopyrrolidine-2-carboxylic acid
  SITE 14: note = (2S,4R)-4-(4-(pyrimidin-5-yl)benzyl) pyrrolidine-2-carboxylic acid
XWXGPXDXGXXXPX

SEQ ID NO: 301 - protein, 14 aa, synthetic construct
  SITE 1: note (2S)-3-[4-(2-acetamidoethoxy)phenyl]-2-amino-propanoic acid
  SITE 3: note (S)-2-Amino-3-(4-(5-oxo-4,5-dihydro-1,2,4-oxadiazol-3-yl)ph enyl)propanoic acid
  SITE 5: note = (2S,4R)-4-aminopyrrolidine-2-carboxylic acid
  SITE 6: note = (2S,3S)-2-amino-3-(1-naphthyl)butanoic acid
  SITE 7: note = (2S)-2-amino-5-ureido-pentanoic acid
  SITE 8: note = D-N-methyl-Alanine
  SITE 10: note = 4-[4-[(2S)-2-amino-2-carboxy-ethyl]phenyl]benzoic acid
  SITE 11: note (S)-21-Amino-21-carboxy-N,N,N-trimethyl-15-oxo-3,6,9,12-tet raoxa-16-azahenicosan-1-aminium
  SITE 12: note = (S)-2-Aminopentanoic acid
  SITE 13: note = (2R,4S)-4-aminopyrrolidine-2-carboxylic acid
  SITE 14: note = (2S,4R)-4-(4-(pyrimidin-5-yl)benzyl) pyrrolidine-2-carboxylic acid
XWXGPXXXGXXXPX

SEQ ID NO: 302 - protein, 14 aa, synthetic construct
  SITE 1: note (S)-2-Amino-3-(4-((pyrrolidine-1-carbonyl)oxy)phenyl)propan oic acid
  SITE 3: note = (S)-2-Amino-3-(4-carbamoylphenyl)propanoic acid
  SITE 5: note = (2S,4R)-4-aminopyrrolidine-2-carboxylic acid
  SITE 6: note = (2S,3S)-2-amino-3-(1-naphthyl)butanoic acid
  SITE 7: note = (2S)-2-amino-5-ureido-pentanoic acid
  SITE 8: note = D-N-methyl-Alanine
  SITE 10: note = 4-[4-[(2S)-2-amino-2-carboxy-ethyl]phenyl]benzoic acid
  SITE 11: note = (S)-2-amino-5-methoxypentanoic acid
  SITE 12: note = (S)-2-Aminopentanoic acid
  SITE 13: note = (2R,4S)-4-aminopyrrolidine-2-carboxylic acid
  SITE 14: note = (2S,4R)-4-(4-(pyrimidin-5-yl)benzyl) pyrrolidine-2-carboxylic acid
XWFGPXXXGXXXPX

SEQ ID NO: 303 - protein, 14 aa, synthetic construct
  SITE 1: note (S)-2-Amino-3-(4-((pyrrolidine-1-carbonyl)oxy)phenyl)propan oic acid
  SITE 3: note (S)-2-Amino-3-(4-(5-oxo-4,5-dihydro-1,2,4-oxadiazol-3-yl)ph enyl)propanoic acid
  SITE 5: note = (2S,4R)-4-aminopyrrolidine-2-carboxylic acid
  SITE 6: note = (2S,3S)-2-amino-3-(1-naphthyl)butanoic acid
  SITE 7: note = (2S)-2-amino-5-ureido-pentanoic acid
  SITE 8: note = D-N-methyl-Alanine
  SITE 10: note = 4-[4-[(2S)-2-amino-2-carboxy-ethyl]phenyl]benzoic acid
  SITE 11: note = (S)-2-amino-5-methoxypentanoic acid
  SITE 12: note = (S)-2-Aminopentanoic acid
  SITE 13: note = (2R,4S)-4-aminopyrrolidine-2-carboxylic acid
  SITE 14: note = (2S,4R)-4-(4-(pyrimidin-5-yl)benzyl) pyrrolidine-2-carboxylic acid
XWXGPXXXGXXXPX

SEQ ID NO: 304 - protein, 14 aa, synthetic construct
  SITE 1: note (2S)-3-[4-(2-acetamidoethoxy)phenyl]-2-amino-propanoic acid
  SITE 3: note (S)-2-Amino-3-(4-(5-oxo-4,5-dihydro-1,2,4-oxadiazol-3-yl)ph enyl)propanoic acid
  SITE 5: note = (2S,4R)-4-aminopyrrolidine-2-carboxylic acid
  SITE 6: note = (2S,3S)-2-amino-3-(1-naphthyl)butanoic acid
  SITE 7: note = (2S)-2-amino-5-ureido-pentanoic acid
  SITE 8: note = D-N-methyl-Alanine
  SITE 10: note = 4-[4-[(2S)-2-amino-2-carboxy-ethyl]phenyl]benzoic acid
  SITE 11: note = (S)-2-amino-5-methoxypentanoic acid
  SITE 12: note = (S)-2-Aminopentanoic acid
  SITE 13: note = (2R,4S)-4-hydroxypyrrolidine-2-carboxylic acid
  SITE 14: note (2S,4R)-4-(pyrimidin-5-ylmethyl)pyrrolidine-2-carboxylic acid
XWXGPXXXGXXXXX

SEQ ID NO: 305 - protein, 14 aa, synthetic construct
  SITE 1: note (S)-3-(4-(4-Acetylpiperazin-1-yl)phenyl)-2-aminopropanoic acid
  SITE 3: note (S)-2-Amino-3-(4-(5-oxo-4,5-dihydro-1,2,4-oxadiazol-3-yl)ph enyl)propanoic acid
  SITE 5: note = (2S,4R)-4-aminopyrrolidine-2-carboxylic acid
  SITE 6: note = (2S,3S)-2-amino-3-(1-naphthyl)butanoic acid
  SITE 7: note = (2S)-2-amino-5-ureido-pentanoic acid
  SITE 8: note = D-N-methyl-Alanine
  SITE 10: note = 4-[4-[(2S)-2-amino-2-carboxy-ethyl]phenyl]benzoic acid
  SITE 11: note = (S)-2-amino-5-methoxypentanoic acid
  SITE 12: note = (S)-2-Aminopentanoic acid
  SITE 13: note = (2R,4S)-4-hydroxypyrrolidine-2-carboxylic acid
  SITE 14: note = (2S,4R)-4-(4-(pyrimidin-5-yl)benzyl) pyrrolidine-2-carboxylic acid
XWXGPXXXGXXXXX

SEQ ID NO: 306 - protein, 14 aa, synthetic construct
  SITE 1: note (S)-2-Amino-3-(4-(5-methyl-1,2,4-oxadiazol-3-yl)phenyl)prop anoic acid
  SITE 3: note (S)-2-Amino-3-(4-(5-oxo-4,5-dihydro-1,2,4-oxadiazol-3-yl)ph enyl)propanoic acid
  SITE 5: note = (2S,4R)-4-aminopyrrolidine-2-carboxylic acid
  SITE 6: note = (2S,3S)-2-amino-3-(1-naphthyl)butanoic acid
  SITE 7: note = (2S)-2-amino-5-ureido-pentanoic acid
  SITE 8: note = D-N-methyl-Alanine
  SITE 10: note = 4-[4-[(2S)-2-amino-2-carboxy-ethyl]phenyl]benzoic acid
  SITE 11: note = (S)-2-amino-5-methoxypentanoic acid
  SITE 12: note = (S)-2-Aminopentanoic acid
  SITE 13: note = (2R,4S)-4-hydroxypyrrolidine-2-carboxylic acid
  SITE 14: note = (2S,4R)-4-(4-(pyrimidin-5-yl)benzyl) pyrrolidine-2-carboxylic acid
XWXGPXXXGXXXXX

SEQ ID NO: 307 - protein, 14 aa, synthetic construct
  SITE 1: note (2S)-3-[4-(2-acetamidoethoxy)phenyl]-2-amino-propanoic acid
  SITE 3: note (S)-2-Amino-3-(4-(5-oxo-4,5-dihydro-1,2,4-oxadiazol-3-yl)ph enyl)propanoic acid
  SITE 5: note = (2S,4R)-4-aminopyrrolidine-2-carboxylic acid
  SITE 6: note = (2S,3S)-2-amino-3-(1-naphthyl)butanoic acid
  SITE 7: note = (2S)-2-amino-5-ureido-pentanoic acid
  SITE 8: note = D-N-methyl-Alanine
  SITE 10: note = 4-[4-[(2S)-2-amino-2-carboxy-ethyl]phenyl]benzoic acid
  SITE 11: note = (S)-2-amino-5-methoxypentanoic acid
  SITE 12: note = (S)-2-Aminopentanoic acid
  SITE 13: note = (2R,4S)-4-hydroxypyrrolidine-2-carboxylic acid
  SITE 14: note = (2S,4R)-4-(4-(pyrimidin-5-yl)benzyl) pyrrolidine-2-carboxylic acid
XWXGPXXXGXXXXX

SEQ ID NO: 308 - protein, 14 aa, synthetic construct
  SITE 1: note (S)-2-Amino-3-(4-(5-methyl-1,2,4-oxadiazol-3-yl)phenyl)prop anoic acid
  SITE 3: note = 4-[(2S)-2-amino-2-carboxy-ethyl]benzoic acid
  SITE 5: note = (2S,4R)-4-aminopyrrolidine-2-carboxylic acid
  SITE 6: note = (2S,3S)-2-Amino-3-(3-methylnaphthalen-1-yl)butanoic acid
  SITE 8: note = D-N-methyl-Alanine
  SITE 10: note = 4-[4-[(2S)-2-amino-2-carboxy-ethyl]phenyl]benzoic acid
  SITE 11: note = (S)-2-amino-5-methoxypentanoic acid
  SITE 13: note = (2R,4S)-4-aminopyrrolidine-2-carboxylic acid
XWFGPXDXGXXAPP

SEQ ID NO: 309 - protein, 14 aa, synthetic construct
  SITE 1: note (S)-2-Amino-3-(4-(5-methyl-1,2,4-oxadiazol-3-yl)phenyl)prop anoic acid
  SITE 3: note (S)-2-Amino-3-(4-(5-oxo-4,5-dihydro-1,2,4-oxadiazol-3-yl)ph enyl)propanoic acid
  SITE 5: note = (2S,4R)-4-aminopyrrolidine-2-carboxylic acid
  SITE 6: note = (2S,3S)-2-Amino-3-(3-methylnaphthalen-1-yl)butanoic acid
  SITE 8: note = D-N-methyl-Alanine
  SITE 10: note = 4-[4-[(2S)-2-amino-2-carboxy-ethyl]phenyl]benzoic acid
  SITE 11: note = (S)-2-amino-5-methoxypentanoic acid
  SITE 12: note = (S)-2-Aminopentanoic acid
  SITE 13: note = (2R,4S)-4-aminopyrrolidine-2-carboxylic acid
XWXGPXDXGXXXPP

SEQ ID NO: 310 - protein, 14 aa, synthetic construct
  SITE 1: note (S)-2-Amino-3-(4-(5-methyl-1,2,4-oxadiazol-3-yl)phenyl)prop anoic acid
  SITE 3: note = 4-[(2S)-2-amino-2-carboxy-ethyl]benzoic acid
  SITE 5: note = (2S,4R)-4-aminopyrrolidine-2-carboxylic acid
  SITE 6: note = (2S,3S)-2-Amino-3-(3-methylnaphthalen-1-yl)butanoic acid
  SITE 7: note = (2S)-2-amino-5-ureido-pentanoic acid
  SITE 8: note = D-N-methyl-Alanine
  SITE 10: note = 4-[4-[(2S)-2-amino-2-carboxy-ethyl]phenyl]benzoic acid
  SITE 11: note = (S)-2-amino-5-methoxypentanoic acid
  SITE 13: note = (2R,4S)-4-aminopyrrolidine-2-carboxylic acid
XWFGPXXXGXXAPP

SEQ ID NO: 311 - protein, 14 aa, synthetic construct
  SITE 1: note (S)-2-Amino-3-(4-(5-methyl-1,2,4-oxadiazol-3-yl)phenyl)prop anoic acid
  SITE 3: note (S)-2-Amino-3-(4-(5-oxo-4,5-dihydro-1,2,4-oxadiazol-3-yl)ph enyl)propanoic acid
  SITE 5: note = (2S,4R)-4-aminopyrrolidine-2-carboxylic acid
  SITE 6: note = (2S,3S)-2-Amino-3-(3-methylnaphthalen-1-yl)butanoic acid
  SITE 7: note = (2S)-2-amino-5-ureido-pentanoic acid
  SITE 8: note = D-N-methyl-Alanine
  SITE 10: note = 4-[4-[(2S)-2-amino-2-carboxy-ethyl]phenyl]benzoic acid
  SITE 11: note = (S)-2-amino-5-methoxypentanoic acid
  SITE 13: note = (2R,4S)-4-aminopyrrolidine-2-carboxylic acid
XWXGPXXXGXXAPP

SEQ ID NO: 312 - protein, 14 aa, synthetic construct
  SITE 1: note (S)-2-Amino-3-(4-(5-methyl-1,2,4-oxadiazol-3-yl)phenyl)prop anoic acid
  SITE 3: note = 4-[(2S)-2-amino-2-carboxy-ethyl]benzoic acid
  SITE 5: note = (2S,4R)-4-aminopyrrolidine-2-carboxylic acid
  SITE 6: note = (2S,3S)-2-Amino-3-(3-methylnaphthalen-1-yl)butanoic acid
  SITE 8: note = D-N-methyl-Alanine
  SITE 10: note = 4-[4-[(2S)-2-amino-2-carboxy-ethyl]phenyl]benzoic acid
  SITE 11: note = (S)-2-amino-5-methoxypentanoic acid
  SITE 12: note = (S)-2-Aminopentanoic acid
  SITE 13: note = (2R,4S)-4-aminopyrrolidine-2-carboxylic acid
XWFGPXDXGXXXPP

SEQ ID NO: 313 - protein, 14 aa, synthetic construct
  SITE 1: note (S)-2-Amino-3-(4-(5-methyl-1,2,4-oxadiazol-3-yl)phenyl)prop anoic acid
  SITE 3: note = 4-[(2S)-2-amino-2-carboxy-ethyl]benzoic acid
  SITE 5: note = (2S,4R)-4-aminopyrrolidine-2-carboxylic acid
  SITE 6: note = (2S,3S)-2-Amino-3-(3-methylnaphthalen-1-yl)butanoic acid
  SITE 8: note = D-N-methyl-Alanine
  SITE 10: note = 4-[4-[(2S)-2-amino-2-carboxy-ethyl]phenyl]benzoic acid
  SITE 11: note = (S)-2-amino-5-methoxypentanoic acid
  SITE 12: note (S)-2-Amino-3-(5-(methoxymethyl)-1,2,4-oxadiazol-3-yl)propa noic acid
  SITE 13: note = (2R,4S)-4-aminopyrrolidine-2-carboxylic acid
XWFGPXDXGXXXPP

SEQ ID NO: 314 - protein, 14 aa, synthetic construct
  SITE 1: note (2S)-3-[4-(2-acetamidoethoxy)phenyl]-2-amino-propanoic acid
  SITE 3: note (S)-2-Amino-3-(4-(5-oxo-4,5-dihydro-1,2,4-oxadiazol-3-yl)ph enyl)propanoic acid
  SITE 5: note = (2S,4R)-4-aminopyrrolidine-2-carboxylic acid
  SITE 6: note = (2S,3S)-2-amino-3-(1-naphthyl)butanoic acid
  SITE 8: note = D-N-methyl-Alanine
  SITE 10: note = 4-[4-[(2S)-2-amino-2-carboxy-ethyl]phenyl]benzoic acid
  SITE 11: note (S)-21-Amino-21-carboxy-N,N,N-trimethyl-15-oxo-3,6,9,12-tet raoxa-16-azahenicosan-1-aminium
  SITE 12: note = (S)-2-Aminopentanoic acid
  SITE 13: note = (2R,4S)-4-aminopyrrolidine-2-carboxylic acid
  SITE 14: note = (2S,4R)-4-(4-(pyrimidin-5-yl)benzyl) pyrrolidine-2-carboxylic acid
XWXGPXDXGXXXPX

SEQ ID NO: 315 - protein, 14 aa, synthetic construct
  SITE 1: note (2S)-3-[4-(2-acetamidoethoxy)phenyl]-2-amino-propanoic acid
  SITE 3: note (S)-2-Amino-3-(4-(5-oxo-4,5-dihydro-1,2,4-oxadiazol-3-yl)ph enyl)propanoic acid
  SITE 5: note = (2S,4R)-4-aminopyrrolidine-2-carboxylic acid
  SITE 6: note = (2S,3S)-2-amino-3-(1-naphthyl)butanoic acid
  SITE 8: note = D-N-methyl-Alanine
  SITE 10: note = 4-[4-[(2S)-2-amino-2-carboxy-ethyl]phenyl]benzoic acid
  SITE 11: note (S)-2-(2-(3-((5-amino-5-carboxypentyl)amino)-3-oxopropoxy)e thoxy)-N,N,N-trimethylethan-1-aminium
  SITE 12: note = (S)-2-Aminopentanoic acid
  SITE 13: note = (2R,4S)-4-aminopyrrolidine-2-carboxylic acid
  SITE 14: note = (2S,4R)-4-(4-(pyrimidin-5-yl)benzyl) pyrrolidine-2-carboxylic acid
XWXGPXDXGXXXPX

SEQ ID NO: 316 - protein, 14 aa, synthetic construct
  SITE 1: note (S)-2-Amino-3-(4-(5-methyl-1,2,4-oxadiazol-3-yl)phenyl)prop anoic acid
  SITE 3: note (S)-2-Amino-3-(4-(5-oxo-4,5-dihydro-1,2,4-oxadiazol-3-yl)ph enyl)propanoic acid
  SITE 5: note = (2S,4R)-4-aminopyrrolidine-2-carboxylic acid
  SITE 6: note = (2S,3S)-2-amino-3-(1-naphthyl)butanoic acid
  SITE 8: note = D-N-methyl-Alanine
  SITE 10: note = 4-[4-[(2S)-2-amino-2-carboxy-ethyl]phenyl]benzoic acid
  SITE 11: note (S)-21-Amino-21-carboxy-N,N,N-trimethyl-15-oxo-3,6,9,12-tet raoxa-16-azahenicosan-1-aminium
  SITE 12: note = (S)-2-Aminopentanoic acid
  SITE 13: note = (2R,4S)-4-aminopyrrolidine-2-carboxylic acid
  SITE 14: note = (2S,4R)-4-(4-(pyrimidin-5-yl)benzyl) pyrrolidine-2-carboxylic acid
XWXGPXDXGXXXPX

SEQ ID NO: 317 - protein, 14 aa, synthetic construct
  SITE 1: note (S)-2-Amino-3-(4-(5-methyl-1,2,4-oxadiazol-3-yl)phenyl)prop anoic acid
  SITE 3: note (S)-2-Amino-3-(4-(5-oxo-4,5-dihydro-1,2,4-oxadiazol-3-yl)ph enyl)propanoic acid
  SITE 5: note = (2S,4R)-4-aminopyrrolidine-2-carboxylic acid
  SITE 6: note = (2S,3S)-2-amino-3-(1-naphthyl)butanoic acid
  SITE 8: note = D-N-methyl-Alanine
  SITE 10: note = 4-[4-[(2S)-2-amino-2-carboxy-ethyl]phenyl]benzoic acid
  SITE 11: note (S)-2-(2-(3-((5-amino-5-carboxypentyl)amino)-3-oxopropoxy)e thoxy)-N,N,N-trimethylethan-1-aminium
  SITE 12: note = (S)-2-Aminopentanoic acid
  SITE 13: note = (2R,4S)-4-aminopyrrolidine-2-carboxylic acid
  SITE 14: note = (2S,4R)-4-(4-(pyrimidin-5-yl)benzyl) pyrrolidine-2-carboxylic acid
XWXGPXDXGXXXPX

SEQ ID NO: 318 - protein, 14 aa, synthetic construct
  SITE 1: note (2S)-3-[4-(2-acetamidoethoxy)phenyl]-2-amino-propanoic acid
  SITE 3: note (S)-2-Amino-3-(4-(5-oxo-4,5-dihydro-1,2,4-oxadiazol-3-yl)ph enyl)propanoic acid
  SITE 5: note = (2S,4R)-4-aminopyrrolidine-2-carboxylic acid
  SITE 6: note = (2S,3S)-2-amino-3-(1-naphthyl)butanoic acid
  SITE 7: note = (2S)-2-amino-5-ureido-pentanoic acid
  SITE 8: note = D-N-methyl-Alanine
  SITE 10: note (S)-2-Amino-3-(4'-carbamoyl-[1,1'-biphenyl]-4-yl)propanoic acid
  SITE 11: note = (S)-2-amino-5-methoxypentanoic acid
  SITE 12: note = (S)-2-Aminopentanoic acid
  SITE 13: note = (2R,4S)-4-aminopyrrolidine-2-carboxylic acid
  SITE 14: note = (2S,4R)-4-(4-(pyrimidin-5-yl)benzyl) pyrrolidine-2-carboxylic acid
XWXGPXXXGXXXPX

SEQ ID NO: 319 - protein, 14 aa, synthetic construct
  SITE 1: note (2S)-3-[4-(2-acetamidoethoxy)phenyl]-2-amino-propanoic acid
  SITE 3: note (S)-2-Amino-3-(4-(5-oxo-4,5-dihydro-1,2,4-oxadiazol-3-yl)ph enyl)propanoic acid
  SITE 5: note = (2S,4R)-4-aminopyrrolidine-2-carboxylic acid
  SITE 6: note = (2S,3S)-2-Amino-3-(3-methylnaphthalen-1-yl)butanoic acid
  SITE 7: note = (2S)-2-amino-5-ureido-pentanoic acid
  SITE 8: note = (R)-piperidine-2-carboxylic acid
  SITE 10: note (2S)-3-[4-(2-acetamidoethoxy)phenyl]-2-amino-propanoic acid
  SITE 11: note = (S)-2-amino-5-methoxypentanoic acid
  SITE 12: note = (S)-2-Aminopentanoic acid
  SITE 13: note = (2R,4S)-4-aminopyrrolidine-2-carboxylic acid
  SITE 14: note = (2S,4R)-4-(4-(pyrimidin-5-yl)benzyl) pyrrolidine-2-carboxylic acid
XWXGPXXXGXXXPX

SEQ ID NO: 320 - protein, 14 aa, synthetic construct
  SITE 1: note (2S)-3-[4-(2-acetamidoethoxy)phenyl]-2-amino-propanoic acid
  SITE 3: note (S)-2-Amino-3-(4-(5-oxo-4,5-dihydro-1,2,4-oxadiazol-3-yl)ph enyl)propanoic acid
  SITE 5: note = (2S,4R)-4-aminopyrrolidine-2-carboxylic acid
  SITE 6: note = (2S,3S)-2-Amino-3-(3-methylnaphthalen-1-yl)butanoic acid
  SITE 7: note = (2S)-2-amino-5-ureido-pentanoic acid
  SITE 8: note = (R)-piperidine-2-carboxylic acid
  SITE 10: note (S)-2-Amino-3-(4'-carbamoyl-[1,1'-biphenyl]-4-yl)propanoic acid
  SITE 11: note = (S)-2-amino-5-methoxypentanoic acid
  SITE 12: note = (S)-2-Aminopentanoic acid
  SITE 13: note = (2R,4S)-4-aminopyrrolidine-2-carboxylic acid
  SITE 14: note = (2S,4R)-4-(4-(pyrimidin-5-yl)benzyl) pyrrolidine-2-carboxylic acid
XWXGPXXXGXXXPX

SEQ ID NO: 321 - protein, 14 aa, synthetic construct
  SITE 1: note (2S)-3-[4-(2-acetamidoethoxy)phenyl]-2-amino-propanoic acid
  SITE 3: note = 4-[(2S)-2-amino-2-carboxy-ethyl]benzoic acid
  SITE 5: note = (2S,4R)-4-aminopyrrolidine-2-carboxylic acid
  SITE 6: note = (2S,3S)-2-Amino-3-(3-methylnaphthalen-1-yl)butanoic acid
  SITE 8: note = (R)-piperidine-2-carboxylic acid
  SITE 10: note = 4-[4-[(2S)-2-amino-2-carboxy-ethyl]phenyl]benzoic acid
  SITE 11: note = (S)-2-amino-5-methoxypentanoic acid
  SITE 13: note = (2R,4S)-4-aminopyrrolidine-2-carboxylic acid
XWFGPXDXGXXAPP

SEQ ID NO: 322 - protein, 14 aa, synthetic construct
  SITE 1: note (2S)-3-[4-(2-acetamidoethoxy)phenyl]-2-amino-propanoic acid
  SITE 3: note = 4-[(2S)-2-amino-2-carboxy-ethyl]benzoic acid
  SITE 5: note = (2S,4R)-4-aminopyrrolidine-2-carboxylic acid
  SITE 6: note = (2S,3S)-2-Amino-3-(3-methylnaphthalen-1-yl)butanoic acid
  SITE 8: note = (R)-piperidine-2-carboxylic acid
  SITE 10: note = 4-[4-[(2S)-2-amino-2-carboxy-ethyl]phenyl]benzoic acid
  SITE 11: note = (S)-2-amino-5-methoxypentanoic acid
  SITE 12: note = (S)-2-Aminopentanoic acid
  SITE 13: note = (2R,4S)-4-aminopyrrolidine-2-carboxylic acid
XWFGPXDXGXXXPP

SEQ ID NO: 323 - protein, 14 aa, synthetic construct
  SITE 1: note (2S)-3-[4-(2-acetamidoethoxy)phenyl]-2-amino-propanoic acid
  SITE 3: note = 4-[(2S)-2-amino-2-carboxy-ethyl]benzoic acid
  SITE 5: note = (2S,4R)-4-aminopyrrolidine-2-carboxylic acid
  SITE 6: note = (2S,3S)-2-Amino-3-(3-methylnaphthalen-1-yl)butanoic acid
  SITE 7: note = (2S)-2-amino-5-ureido-pentanoic acid
  SITE 8: note = (R)-piperidine-2-carboxylic acid
  SITE 10: note = 4-[4-[(2S)-2-amino-2-carboxy-ethyl]phenyl]benzoic acid
  SITE 11: note = (S)-2-amino-5-methoxypentanoic acid
  SITE 13: note = (2R,4S)-4-aminopyrrolidine-2-carboxylic acid
XWFGPXXXGXXAPP

SEQ ID NO: 324 - protein, 14 aa, synthetic construct
  SITE 1: note (2S)-3-[4-(2-acetamidoethoxy)phenyl]-2-amino-propanoic acid
  SITE 3: note = 4-[(2S)-2-amino-2-carboxy-ethyl]benzoic acid
  SITE 5: note = (2S,4R)-4-aminopyrrolidine-2-carboxylic acid
  SITE 6: note = (2S,3S)-2-Amino-3-(3-methylnaphthalen-1-yl)butanoic acid
  SITE 7: note = (2S)-2-amino-5-ureido-pentanoic acid
  SITE 8: note = (R)-piperidine-2-carboxylic acid
  SITE 10: note = 4-[4-[(2S)-2-amino-2-carboxy-ethyl]phenyl]benzoic acid
  SITE 11: note = (S)-2-amino-5-methoxypentanoic acid
  SITE 12: note (S)-2-Amino-3-(5-methyl-1,2,4-oxadiazol-3-yl)propanoic acid
  SITE 13: note = (2R,4S)-4-aminopyrrolidine-2-carboxylic acid
XWFGPXXXGXXXPP

SEQ ID NO: 325 - protein, 14 aa, synthetic construct
  SITE 1: note (2S)-3-[4-(2-acetamidoethoxy)phenyl]-2-amino-propanoic acid
  SITE 3: note (S)-2-Amino-3-(4-(5-oxo-4,5-dihydro-1,2,4-oxadiazol-3-yl)ph enyl)propanoic acid
  SITE 5: note = (2S,4R)-4-aminopyrrolidine-2-carboxylic acid
  SITE 6: note = (2S,3S)-2-Amino-3-(3-methylnaphthalen-1-yl)butanoic acid
  SITE 8: note = D-N-methyl-Alanine
  SITE 10: note (S)-2-Amino-3-(4-(5-oxo-4,5-dihydro-1,2,4-oxadiazol-3-yl)ph enyl)propanoic acid
  SITE 11: note = (S)-2-amino-5-methoxypentanoic acid
  SITE 12: note = (S)-2-Aminopentanoic acid
  SITE 13: note = (2R,4S)-4-aminopyrrolidine-2-carboxylic acid
  SITE 14: note = (2S,4R)-4-(4-(pyrimidin-5-yl)benzyl) pyrrolidine-2-carboxylic acid
XWXGPXDXGXXXPX

SEQ ID NO: 326 - protein, 14 aa, synthetic construct
  SITE 1: note (2S)-3-[4-(2-acetamidoethoxy)phenyl]-2-amino-propanoic acid
  SITE 3: note = 4-[(2S)-2-amino-2-carboxy-ethyl]benzoic acid
  SITE 5: note = (2S,4R)-4-aminopyrrolidine-2-carboxylic acid
  SITE 6: note = (2S,3S)-2-Amino-3-(3-methylnaphthalen-1-yl)butanoic acid
  SITE 7: note = (2S)-2-amino-5-ureido-pentanoic acid
  SITE 8: note = (R)-piperidine-2-carboxylic acid
  SITE 10: note = 4-[4-[(2S)-2-amino-2-carboxy-ethyl]phenyl]benzoic acid
  SITE 11: note = (S)-2-amino-5-methoxypentanoic acid
  SITE 12: note = (S)-2-Aminopentanoic acid
  SITE 13: note = (2R,4S)-4-aminopyrrolidine-2-carboxylic acid
XWFGPXXXGXXXPP

SEQ ID NO: 327 - protein, 14 aa, synthetic construct
  SITE 1: note (S)-2-Amino-3-(4-(5-methyl-1,3,4-oxadiazol-2-yl)phenyl)prop anoic acid
  SITE 3: note = 4-[(2S)-2-amino-2-carboxy-ethyl]benzoic acid
  SITE 5: note = (2S,4R)-4-aminopyrrolidine-2-carboxylic acid
  SITE 6: note = (2S,3S)-2-Amino-3-(3-chloronaphthalen-1-yl)butanoic acid
  SITE 7: note = N4,N4-dimethyl-L-asparagine
  SITE 8: note = D-N-methyl-Alanine
  SITE 10: note = 4-[4-[(2S)-2-amino-2-carboxy-ethyl]phenyl]benzoic acid
  SITE 11: note = (2S)-2,4-diaminobutanoic acid
  SITE 12: note = N4,N4-dimethyl-L-asparagine
  SITE 13: note = (2R,4S)-4-aminopyrrolidine-2-carboxylic acid
XWFGPXXXGXXXPP

SEQ ID NO: 328 - protein, 14 aa, synthetic construct
  SITE 1: note (S)-2-Amino-3-(4-(5-methyl-1,3,4-oxadiazol-2-yl)phenyl)prop anoic acid
  SITE 3: note = 4-[(2S)-2-amino-2-carboxy-ethyl]benzoic acid
  SITE 5: note = (2S,4R)-4-aminopyrrolidine-2-carboxylic acid
  SITE 6: note = (2S,3S)-2-Amino-3-(3-chloronaphthalen-1-yl)butanoic acid
  SITE 8: note = D-N-methyl-Alanine
  SITE 10: note = 4-[4-[(2S)-2-amino-2-carboxy-ethyl]phenyl]benzoic acid
  SITE 11: note = (2S)-2,4-diaminobutanoic acid
  SITE 12: note = N4,N4-dimethyl-L-asparagine
  SITE 13: note = (2R,4S)-4-aminopyrrolidine-2-carboxylic acid
XWFGPXDXGXXXPP

SEQ ID NO: 329 - protein, 14 aa, synthetic construct
  SITE 1: note (2S)-3-[4-(2-acetamidoethoxy)phenyl]-2-amino-propanoic acid
  SITE 3: note = 4-[(2S)-2-amino-2-carboxy-ethyl]benzoic acid
  SITE 5: note = (2S,4R)-4-aminopyrrolidine-2-carboxylic acid
  SITE 6: note = (2S,3S)-2-Amino-3-(3-chloronaphthalen-1-yl)butanoic acid
  SITE 8: note = D-N-methyl-Alanine
  SITE 10: note = 4-[4-[(2S)-2-amino-2-carboxy-ethyl]phenyl]benzoic acid
  SITE 11: note = (2S)-2,4-diaminobutanoic acid
  SITE 12: note = N4,N4-dimethyl-L-asparagine
  SITE 13: note = (2R,4S)-4-aminopyrrolidine-2-carboxylic acid
XWFGPXDXGXXXPP

SEQ ID NO: 330 - protein, 14 aa, synthetic construct
  SITE 1: note (2S)-3-[4-(2-acetamidoethoxy)phenyl]-2-amino-propanoic acid
  SITE 3: note = 4-[(2S)-2-amino-2-carboxy-ethyl]benzoic acid
  SITE 5: note = (2S,4R)-4-aminopyrrolidine-2-carboxylic acid
  SITE 6: note = (2S,3S)-2-Amino-3-(3-chloronaphthalen-1-yl)butanoic acid
  SITE 8: note = D-N-methyl-Alanine
  SITE 10: note = 4-[4-[(2S)-2-amino-2-carboxy-ethyl]phenyl]benzoic acid
  SITE 11: note = (S)-2-amino-5-methoxypentanoic acid
  SITE 12: note = N4,N4-dimethyl-L-asparagine
  SITE 13: note = (2R,4S)-4-aminopyrrolidine-2-carboxylic acid
XWFGPXDXGXXXPP

SEQ ID NO: 331 - protein, 14 aa, synthetic construct
  SITE 1: note (2S)-3-[4-(2-acetamidoethoxy)phenyl]-2-amino-propanoic acid
  SITE 3: note = 4-[(2S)-2-amino-2-carboxy-ethyl]benzoic acid
  SITE 5: note = (2S,4R)-4-aminopyrrolidine-2-carboxylic acid
  SITE 6: note = (2S,3S)-2-Amino-3-(3-chloronaphthalen-1-yl)butanoic acid
  SITE 8: note = (R)-piperidine-2-carboxylic acid
  SITE 10: note = 4-[4-[(2S)-2-amino-2-carboxy-ethyl]phenyl]benzoic acid
  SITE 11: note (S)-21-Amino-21-carboxy-N,N,N-trimethyl-15-oxo-3,6,9,12-tet raoxa-16-azahenicosan-1-aminium
  SITE 12: note = (S)-2-amino-5-methoxypentanoic acid
  SITE 13: note = (2R,4S)-4-aminopyrrolidine-2-carboxylic acid
  SITE 14: note = (2S,4R)-4-(4-(pyrimidin-5-yl)benzyl) pyrrolidine-2-carboxylic acid
XWFGPXDXGXXXPX

SEQ ID NO: 332 - protein, 14 aa, synthetic construct
  SITE 1: note (2S)-3-[4-(2-acetamidoethoxy)phenyl]-2-amino-propanoic acid
  SITE 3: note = 4-[(2S)-2-amino-2-carboxy-ethyl]benzoic acid
  SITE 5: note = (2S,4R)-4-aminopyrrolidine-2-carboxylic acid
  SITE 6: note = (2S,3S)-2-Amino-3-(3-chloronaphthalen-1-yl)butanoic acid
  SITE 8: note = (R)-piperidine-2-carboxylic acid
  SITE 10: note = 4-[4-[(2S)-2-amino-2-carboxy-ethyl]phenyl]benzoic acid
  SITE 11: note (S)-21-Amino-21-carboxy-N,N,N-trimethyl-15-oxo-3,6,9,12-tet raoxa-16-azahenicosan-1-aminium
  SITE 12: note = (S)-2-Amino-3-(tetrahydro-2H-pyran-4-yl)propanoic acid
  SITE 13: note = (2R,4S)-4-aminopyrrolidine-2-carboxylic acid
  SITE 14: note = (2S,4R)-4-(4-(pyrimidin-5-yl)benzyl) pyrrolidine-2-carboxylic acid
XWFGPXDXGXXXPX

SEQ ID NO: 333 - protein, 14 aa, synthetic construct
  SITE 1: note (2S)-3-[4-(2-acetamidoethoxy)phenyl]-2-amino-propanoic acid
  SITE 3: note = 4-[(2S)-2-amino-2-carboxy-ethyl]benzoic acid
  SITE 5: note = (2S,4R)-4-aminopyrrolidine-2-carboxylic acid
  SITE 6: note = (2S,3S)-2-Amino-3-(3-chloronaphthalen-1-yl)butanoic acid
  SITE 8: note = (R)-piperidine-2-carboxylic acid
  SITE 10: note = 4-[4-[(2S)-2-amino-2-carboxy-ethyl]phenyl]benzoic acid
  SITE 11: note (S)-21-Amino-21-carboxy-N,N,N-trimethyl-15-oxo-3,6,9,12-tet raoxa-16-azahenicosan-1-aminium
  SITE 12: note = (2S)-2-amino-5-ureido-pentanoic acid
  SITE 13: note = (2R,4S)-4-aminopyrrolidine-2-carboxylic acid
  SITE 14: note = (2S,4R)-4-(4-(pyrimidin-5-yl)benzyl) pyrrolidine-2-carboxylic acid
XWFGPXDXGXXXPX

SEQ ID NO: 334 - protein, 14 aa, synthetic construct
  SITE 1: note (2S)-3-[4-(2-acetamidoethoxy)phenyl]-2-amino-propanoic acid
  SITE 3: note = 4-[(2S)-2-amino-2-carboxy-ethyl]benzoic acid
  SITE 5: note = (2S,4R)-4-aminopyrrolidine-2-carboxylic acid
  SITE 6: note = (2S,3S)-2-Amino-3-(3-chloronaphthalen-1-yl)butanoic acid
  SITE 8: note = (R)-piperidine-2-carboxylic acid
  SITE 10: note = 4-[4-[(2S)-2-amino-2-carboxy-ethyl]phenyl]benzoic acid
  SITE 11: note (S)-21-Amino-21-carboxy-N,N,N-trimethyl-15-oxo-3,6,9,12-tet raoxa-16-azahenicosan-1-aminium
  SITE 12: note = N4,N4-dimethyl-L-asparagine
  SITE 13: note = (2R,4S)-4-aminopyrrolidine-2-carboxylic acid
  SITE 14: note = (2S,4R)-4-(4-(pyrimidin-5-yl)benzyl) pyrrolidine-2-carboxylic acid
XWFGPXDXGXXXPX

SEQ ID NO: 335 - protein, 14 aa, synthetic construct
  SITE 1: note (2S)-3-[4-(2-acetamidoethoxy)phenyl]-2-amino-propanoic acid
  SITE 3: note = 4-[(2S)-2-amino-2-carboxy-ethyl]benzoic acid
  SITE 5: note = (2S,4R)-4-aminopyrrolidine-2-carboxylic acid
  SITE 6: note = (2S,3S)-2-Amino-3-(3-chloronaphthalen-1-yl)butanoic acid
  SITE 8: note = (R)-piperidine-2-carboxylic acid
  SITE 10: note = 4-[4-[(2S)-2-amino-2-carboxy-ethyl]phenyl]benzoic acid
  SITE 11: note (S)-21-Amino-21-carboxy-N,N,N-trimethyl-15-oxo-3,6,9,12-tet raoxa-16-azahenicosan-1-aminium
  SITE 12: note = (S)-2-Aminopentanoic acid
  SITE 13: note = (2R,4S)-4-aminopyrrolidine-2-carboxylic acid
  SITE 14: note = (2S,4R)-4-(4-(pyrimidin-5-yl)benzyl) pyrrolidine-2-carboxylic acid
XWFGPXDXGXXXPX

SEQ ID NO: 336 - protein, 14 aa, synthetic construct
  SITE 1: note (2S)-3-[4-(2-acetamidoethoxy)phenyl]-2-amino-propanoic acid
  SITE 3: note = 4-[(2S)-2-amino-2-carboxy-ethyl]benzoic acid
  SITE 5: note = (2S,4R)-4-aminopyrrolidine-2-carboxylic acid
  SITE 6: note = (2S,3S)-2-Amino-3-(3-chloronaphthalen-1-yl)butanoic acid
  SITE 8: note = D-N-methyl-Alanine
  SITE 10: note = (S)-2-Amino-3-(4-carbamoylphenyl)propanoic acid
  SITE 11: note (S)-21-Amino-21-carboxy-N,N,N-trimethyl-15-oxo-3,6,9,12-tet raoxa-16-azahenicosan-1-aminium
  SITE 12: note = (S)-2-amino-5-methoxypentanoic acid
  SITE 13: note = (2R,4S)-4-aminopyrrolidine-2-carboxylic acid
  SITE 14: note = (2S,4R)-4-(4-(pyrimidin-5-yl)benzyl) pyrrolidine-2-carboxylic acid
XWFGPXDXGFXXPX

SEQ ID NO: 337 - protein, 14 aa, synthetic construct
  SITE 1: note (2S)-3-[4-(2-acetamidoethoxy)phenyl]-2-amino-propanoic acid
  SITE 3: note = 4-[(2S)-2-amino-2-carboxy-ethyl]benzoic acid
  SITE 5: note = (2S,4R)-4-aminopyrrolidine-2-carboxylic acid
  SITE 6: note = (2S,3S)-2-Amino-3-(3-chloronaphthalen-1-yl)butanoic acid
  SITE 8: note = D-N-methyl-Alanine
  SITE 10: note = (S)-2-Amino-3-(4-carbamoylphenyl)propanoic acid
  SITE 11: note (S)-21-Amino-21-carboxy-N,N,N-trimethyl-15-oxo-3,6,9,12-tet raoxa-16-azahenicosan-1-aminium
  SITE 12: note = (S)-2-Amino-3-(tetrahydro-2H-pyran-4-yl)propanoic acid
  SITE 13: note = (2R,4S)-4-aminopyrrolidine-2-carboxylic acid
  SITE 14: note = (2S,4R)-4-(4-(pyrimidin-5-yl)benzyl) pyrrolidine-2-carboxylic acid
XWFGPXDXGFXXPX

SEQ ID NO: 338 - protein, 14 aa, synthetic construct
  SITE 1: note (2S)-3-[4-(2-acetamidoethoxy)phenyl]-2-amino-propanoic acid
  SITE 3: note = 4-[(2S)-2-amino-2-carboxy-ethyl]benzoic acid
  SITE 5: note = (2S,4R)-4-aminopyrrolidine-2-carboxylic acid
  SITE 6: note = (2S,3S)-2-Amino-3-(3-chloronaphthalen-1-yl)butanoic acid
  SITE 8: note = D-N-methyl-Alanine
  SITE 10: note = (S)-2-Amino-3-(4-carbamoylphenyl)propanoic acid
  SITE 11: note (S)-21-Amino-21-carboxy-N,N,N-trimethyl-15-oxo-3,6,9,12-tet raoxa-16-azahenicosan-1-aminium
  SITE 12: note = (2S)-2-amino-5-ureido-pentanoic acid
  SITE 13: note = (2R,4S)-4-aminopyrrolidine-2-carboxylic acid
  SITE 14: note = (2S,4R)-4-(4-(pyrimidin-5-yl)benzyl) pyrrolidine-2-carboxylic acid
XWFGPXDXGFXXPX

SEQ ID NO: 339 - protein, 14 aa, synthetic construct
  SITE 1: note (2S)-3-[4-(2-acetamidoethoxy)phenyl]-2-amino-propanoic acid
  SITE 3: note = 4-[(2S)-2-amino-2-carboxy-ethyl]benzoic acid
  SITE 5: note = (2S,4R)-4-aminopyrrolidine-2-carboxylic acid
  SITE 6: note = (2S,3S)-2-Amino-3-(3-chloronaphthalen-1-yl)butanoic acid
  SITE 8: note = D-N-methyl-Alanine
  SITE 10: note = (S)-2-Amino-3-(4-carbamoylphenyl)propanoic acid
  SITE 11: note (S)-21-Amino-21-carboxy-N,N,N-trimethyl-15-oxo-3,6,9,12-tet raoxa-16-azahenicosan-1-aminium
  SITE 12: note = (S)-2-Aminopentanoic acid
  SITE 13: note = (2R,4S)-4-aminopyrrolidine-2-carboxylic acid
  SITE 14: note = (2S,4R)-4-(4-(pyrimidin-5-yl)benzyl) pyrrolidine-2-carboxylic acid
XWFGPXDXGFXXPX

SEQ ID NO: 340 - protein, 14 aa, synthetic construct
  SITE 1: note (2S)-3-[4-(2-acetamidoethoxy)phenyl]-2-amino-propanoic acid
  SITE 3: note = (S)-2-Amino-3-(4-carbamoylphenyl)propanoic acid
  SITE 5: note = (2S,4R)-4-aminopyrrolidine-2-carboxylic acid
  SITE 6: note = (2S,3S)-2-Amino-3-(3-chloronaphthalen-1-yl)butanoic acid
  SITE 8: note = (R)-piperidine-2-carboxylic acid
  SITE 10: note = 4-[4-[(2S)-2-amino-2-carboxy-ethyl]phenyl]benzoic acid
  SITE 11: note (S)-21-Amino-21-carboxy-N,N,N-trimethyl-15-oxo-3,6,9,12-tet raoxa-16-azahenicosan-1-aminium
  SITE 12: note = (S)-2-amino-5-methoxypentanoic acid
  SITE 13: note = (2R,4S)-4-aminopyrrolidine-2-carboxylic acid
  SITE 14: note = (2S,4R)-4-(4-(pyrimidin-5-yl)benzyl) pyrrolidine-2-carboxylic acid
XWFGPXDXGXXXPX

SEQ ID NO: 341 - protein, 14 aa, synthetic construct
  SITE 1: note (2S)-3-[4-(2-acetamidoethoxy)phenyl]-2-amino-propanoic acid
  SITE 3: note = (S)-2-Amino-3-(4-carbamoylphenyl)propanoic acid
  SITE 5: note = (2S,4R)-4-aminopyrrolidine-2-carboxylic acid
  SITE 6: note = (2S,3S)-2-Amino-3-(3-chloronaphthalen-1-yl)butanoic acid
  SITE 8: note = (R)-piperidine-2-carboxylic acid
  SITE 10: note = 4-[4-[(2S)-2-amino-2-carboxy-ethyl]phenyl]benzoic acid
  SITE 11: note (S)-21-Amino-21-carboxy-N,N,N-trimethyl-15-oxo-3,6,9,12-tet raoxa-16-azahenicosan-1-aminium
  SITE 12: note = (S)-2-Amino-3-(tetrahydro-2H-pyran-4-yl)propanoic acid
  SITE 13: note = (2R,4S)-4-aminopyrrolidine-2-carboxylic acid
  SITE 14: note = (2S,4R)-4-(4-(pyrimidin-5-yl)benzyl) pyrrolidine-2-carboxylic acid
XWFGPXDXGXXXPX

SEQ ID NO: 342 - protein, 14 aa, synthetic construct
  SITE 1: note (2S)-3-[4-(2-acetamidoethoxy)phenyl]-2-amino-propanoic acid
  SITE 3: note = (S)-2-Amino-3-(4-carbamoylphenyl)propanoic acid
  SITE 5: note = (2S,4R)-4-aminopyrrolidine-2-carboxylic acid
  SITE 6: note = (2S,3S)-2-Amino-3-(3-chloronaphthalen-1-yl)butanoic acid
  SITE 8: note = (R)-piperidine-2-carboxylic acid
  SITE 10: note = 4-[4-[(2S)-2-amino-2-carboxy-ethyl]phenyl]benzoic acid
  SITE 11: note (S)-21-Amino-21-carboxy-N,N,N-trimethyl-15-oxo-3,6,9,12-tet raoxa-16-azahenicosan-1-aminium
  SITE 12: note = (2S)-2-amino-5-ureido-pentanoic acid
  SITE 13: note = (2R,4S)-4-aminopyrrolidine-2-carboxylic acid
  SITE 14: note = (2S,4R)-4-(4-(pyrimidin-5-yl)benzyl) pyrrolidine-2-carboxylic acid
XWFGPXDXGXXXPX

SEQ ID NO: 343 - protein, 14 aa, synthetic construct
  SITE 1: note (2S)-3-[4-(2-acetamidoethoxy)phenyl]-2-amino-propanoic acid
  SITE 3: note = (S)-2-Amino-3-(4-carbamoylphenyl)propanoic acid
  SITE 5: note = (2S,4R)-4-aminopyrrolidine-2-carboxylic acid
  SITE 6: note = (2S,3S)-2-Amino-3-(3-chloronaphthalen-1-yl)butanoic acid
  SITE 8: note = (R)-piperidine-2-carboxylic acid
  SITE 10: note = 4-[4-[(2S)-2-amino-2-carboxy-ethyl]phenyl]benzoic acid
  SITE 11: note (S)-21-Amino-21-carboxy-N,N,N-trimethyl-15-oxo-3,6,9,12-tet raoxa-16-azahenicosan-1-aminium
  SITE 12: note = N4,N4-dimethyl-L-asparagine
  SITE 13: note = (2R,4S)-4-aminopyrrolidine-2-carboxylic acid
  SITE 14: note = (2S,4R)-4-(4-(pyrimidin-5-yl)benzyl) pyrrolidine-2-carboxylic acid
XWFGPXDXGXXXPX

SEQ ID NO: 344 - protein, 14 aa, synthetic construct
  SITE 1: note (2S)-3-[4-(2-acetamidoethoxy)phenyl]-2-amino-propanoic acid
  SITE 3: note = (S)-2-Amino-3-(4-carbamoylphenyl)propanoic acid
  SITE 5: note = (2S,4R)-4-aminopyrrolidine-2-carboxylic acid
  SITE 6: note = (2S,3S)-2-Amino-3-(3-chloronaphthalen-1-yl)butanoic acid
  SITE 8: note = (R)-piperidine-2-carboxylic acid
  SITE 10: note = 4-[4-[(2S)-2-amino-2-carboxy-ethyl]phenyl]benzoic acid
  SITE 11: note (S)-21-Amino-21-carboxy-N,N,N-trimethyl-15-oxo-3,6,9,12-tet raoxa-16-azahenicosan-1-aminium
  SITE 12: note = (S)-2-Aminopentanoic acid
  SITE 13: note = (2R,4S)-4-aminopyrrolidine-2-carboxylic acid
  SITE 14: note = (2S,4R)-4-(4-(pyrimidin-5-yl)benzyl) pyrrolidine-2-carboxylic acid
XWFGPXDXGXXXPX

SEQ ID NO: 345 - protein, 14 aa, synthetic construct
  SITE 1: note (2S)-3-[4-(2-acetamidoethoxy)phenyl]-2-amino-propanoic acid
  SITE 3: note = (S)-2-Amino-3-(4-carbamoylphenyl)propanoic acid
  SITE 5: note = (2S,4R)-4-aminopyrrolidine-2-carboxylic acid
  SITE 6: note = (2S,3S)-2-Amino-3-(3-chloronaphthalen-1-yl)butanoic acid
  SITE 8: note = D-N-methyl-Alanine
  SITE 10: note = 4-[4-[(2S)-2-amino-2-carboxy-ethyl]phenyl]benzoic acid
  SITE 11: note (S)-21-Amino-21-carboxy-N,N,N-trimethyl-15-oxo-3,6,9,12-tet raoxa-16-azahenicosan-1-aminium
  SITE 12: note = (S)-2-amino-5-methoxypentanoic acid
  SITE 13: note = (2R,4S)-4-aminopyrrolidine-2-carboxylic acid
  SITE 14: note = (2S,4R)-4-(4-(pyrimidin-5-yl)benzyl) pyrrolidine-2-carboxylic acid
XWFGPXDXGXXXPX

SEQ ID NO: 346 - protein, 14 aa, synthetic construct
  SITE 1: note (2S)-3-[4-(2-acetamidoethoxy)phenyl]-2-amino-propanoic acid
  SITE 3: note = (S)-2-Amino-3-(4-carbamoylphenyl)propanoic acid
  SITE 5: note = (2S,4R)-4-aminopyrrolidine-2-carboxylic acid
  SITE 6: note = (2S,3S)-2-Amino-3-(3-chloronaphthalen-1-yl)butanoic acid
  SITE 8: note = D-N-methyl-Alanine
  SITE 10: note = 4-[4-[(2S)-2-amino-2-carboxy-ethyl]phenyl]benzoic acid
  SITE 11: note (S)-21-Amino-21-carboxy-N,N,N-trimethyl-15-oxo-3,6,9,12-tet raoxa-16-azahenicosan-1-aminium
  SITE 12: note = (S)-2-Amino-3-(tetrahydro-2H-pyran-4-yl)propanoic acid
  SITE 13: note = (2R,4S)-4-aminopyrrolidine-2-carboxylic acid
  SITE 14: note = (2S,4R)-4-(4-(pyrimidin-5-yl)benzyl) pyrrolidine-2-carboxylic acid
XWFGPXDXGXXXPX

SEQ ID NO: 347 - protein, 14 aa, synthetic construct
  SITE 1: note (2S)-3-[4-(2-acetamidoethoxy)phenyl]-2-amino-propanoic acid
  SITE 3: note = (S)-2-Amino-3-(4-carbamoylphenyl)propanoic acid
  SITE 5: note = (2S,4R)-4-aminopyrrolidine-2-carboxylic acid
  SITE 6: note = (2S,3S)-2-Amino-3-(3-chloronaphthalen-1-yl)butanoic acid
  SITE 8: note = D-N-methyl-Alanine
  SITE 10: note = 4-[4-[(2S)-2-amino-2-carboxy-ethyl]phenyl]benzoic acid
  SITE 11: note (S)-21-Amino-21-carboxy-N,N,N-trimethyl-15-oxo-3,6,9,12-tet raoxa-16-azahenicosan-1-aminium
  SITE 12: note = (2S)-2-amino-5-ureido-pentanoic acid
  SITE 13: note = (2R,4S)-4-aminopyrrolidine-2-carboxylic acid
  SITE 14: note = (2S,4R)-4-(4-(pyrimidin-5-yl)benzyl) pyrrolidine-2-carboxylic acid
XWFGPXDXGXXXPX

SEQ ID NO: 348 - protein, 14 aa, synthetic construct
  SITE 1: note (2S)-3-[4-(2-acetamidoethoxy)phenyl]-2-amino-propanoic acid
  SITE 3: note = (S)-2-Amino-3-(4-carbamoylphenyl)propanoic acid
  SITE 5: note = (2S,4R)-4-aminopyrrolidine-2-carboxylic acid
  SITE 6: note = (2S,3S)-2-Amino-3-(3-chloronaphthalen-1-yl)butanoic acid
  SITE 8: note = D-N-methyl-Alanine
  SITE 10: note = 4-[4-[(2S)-2-amino-2-carboxy-ethyl]phenyl]benzoic acid
  SITE 11: note (S)-21-Amino-21-carboxy-N,N,N-trimethyl-15-oxo-3,6,9,12-tet raoxa-16-azahenicosan-1-aminium
  SITE 12: note = N4,N4-dimethyl-L-asparagine
  SITE 13: note = (2R,4S)-4-aminopyrrolidine-2-carboxylic acid
  SITE 14: note = (2S,4R)-4-(4-(pyrimidin-5-yl)benzyl) pyrrolidine-2-carboxylic acid
XWFGPXDXGXXXPX

SEQ ID NO: 349 - protein, 14 aa, synthetic construct
  SITE 1: note (2S)-3-[4-(2-acetamidoethoxy)phenyl]-2-amino-propanoic acid
  SITE 3: note = (S)-2-Amino-3-(4-carbamoylphenyl)propanoic acid
  SITE 5: note = (2S,4R)-4-aminopyrrolidine-2-carboxylic acid
  SITE 6: note = (2S,3S)-2-Amino-3-(3-chloronaphthalen-1-yl)butanoic acid
  SITE 8: note = D-N-methyl-Alanine
  SITE 10: note = 4-[4-[(2S)-2-amino-2-carboxy-ethyl]phenyl]benzoic acid
  SITE 11: note (S)-21-Amino-21-carboxy-N,N,N-trimethyl-15-oxo-3,6,9,12-tet raoxa-16-azahenicosan-1-aminium
  SITE 12: note = (S)-2-Aminopentanoic acid
  SITE 13: note = (2R,4S)-4-aminopyrrolidine-2-carboxylic acid
  SITE 14: note = (2S,4R)-4-(4-(pyrimidin-5-yl)benzyl) pyrrolidine-2-carboxylic acid
XWFGPXDXGXXXPX

SEQ ID NO: 350 - protein, 14 aa, synthetic construct
  SITE 1: note (S)-2-Amino-3-(4-(5-methyl-1,3,4-oxadiazol-2-yl)phenyl)prop anoic acid
  SITE 3: note = 4-[(2S)-2-amino-2-carboxy-ethyl]benzoic acid
  SITE 5: note = (2S,4R)-4-aminopyrrolidine-2-carboxylic acid
  SITE 6: note = (2S,3S)-2-Amino-3-(3-chloronaphthalen-1-yl)butanoic acid
  SITE 8: note = D-N-methyl-Alanine
  SITE 10: note = 4-[4-[(2S)-2-amino-2-carboxy-ethyl]phenyl]benzoic acid
  SITE 11: note = (S)-2-amino-5-methoxypentanoic acid
  SITE 12: note = (S)-2-amino-5-methoxypentanoic acid
  SITE 13: note = (2R,4S)-4-aminopyrrolidine-2-carboxylic acid
XWFGPXDXGXXXPP

SEQ ID NO: 351 - protein, 14 aa, synthetic construct
  SITE 1: note (S)-2-Amino-3-(4-(5-methyl-1,3,4-oxadiazol-2-yl)phenyl)prop anoic acid
  SITE 3: note = 4-[(2S)-2-amino-2-carboxy-ethyl]benzoic acid
  SITE 5: note = (2S,4R)-4-aminopyrrolidine-2-carboxylic acid
  SITE 6: note = (2S,3S)-2-Amino-3-(3-methylnaphthalen-1-yl)butanoic acid
  SITE 8: note = D-N-methyl-Alanine
  SITE 10: note = 4-[4-[(2S)-2-amino-2-carboxy-ethyl]phenyl]benzoic acid
  SITE 11: note = (S)-2-amino-5-methoxypentanoic acid
  SITE 12: note = (S)-2-amino-5-methoxypentanoic acid
  SITE 13: note = (2R,4S)-4-aminopyrrolidine-2-carboxylic acid
XWFGPXDXGXXXPP

SEQ ID NO: 352 - protein, 14 aa, synthetic construct
  SITE 1: note (2S)-3-[4-(2-acetamidoethoxy)phenyl]-2-amino-propanoic acid
  SITE 3: note = 4-[(2S)-2-amino-2-carboxy-ethyl]benzoic acid
  SITE 5: note = (2S,4R)-4-aminopyrrolidine-2-carboxylic acid
  SITE 6: note = (2S,3S)-2-Amino-3-(3-chloronaphthalen-1-yl)butanoic acid
  SITE 8: note = D-N-methyl-Alanine
  SITE 10: note = 4-[4-[(2S)-2-amino-2-carboxy-ethyl]phenyl]benzoic acid
  SITE 11: note = (S)-2-amino-5-methoxypentanoic acid
  SITE 12: note (S)-2-Amino-3-(5-(methoxymethyl)-1,2,4-oxadiazol-3-yl)propa noic acid
  SITE 13: note = (2R,4S)-4-aminopyrrolidine-2-carboxylic acid
XWFGPXDXGXXXPP

SEQ ID NO: 353 - protein, 14 aa, synthetic construct
  SITE 1: note (2S)-3-[4-(2-acetamidoethoxy)phenyl]-2-amino-propanoic acid
  SITE 3: note = 4-[(2S)-2-amino-2-carboxy-ethyl]benzoic acid
  SITE 5: note = (2S,4R)-4-aminopyrrolidine-2-carboxylic acid
  SITE 6: note = (2S,3S)-2-Amino-3-(3-methylnaphthalen-1-yl)butanoic acid
  SITE 8: note = D-N-methyl-Alanine
  SITE 10: note = 4-[4-[(2S)-2-amino-2-carboxy-ethyl]phenyl]benzoic acid
  SITE 11: note = (S)-2-amino-5-methoxypentanoic acid
  SITE 12: note (S)-2-Amino-3-(5-(methoxymethyl)-1,2,4-oxadiazol-3-yl)propa noic acid
  SITE 13: note = (2R,4S)-4-aminopyrrolidine-2-carboxylic acid
XWFGPXDXGXXXPP

SEQ ID NO: 354 - protein, 14 aa, synthetic construct
  SITE 1: note (2S)-3-[4-(2-acetamidoethoxy)phenyl]-2-amino-propanoic acid
  SITE 3: note = 4-[(2S)-2-amino-2-carboxy-ethyl]benzoic acid
  SITE 5: note = (2S,4R)-4-aminopyrrolidine-2-carboxylic acid
  SITE 6: note = (2S,3S)-2-Amino-3-(3-chloronaphthalen-1-yl)butanoic acid
  SITE 8: note = D-N-methyl-Alanine
  SITE 10: note = 4-[4-[(2S)-2-amino-2-carboxy-ethyl]phenyl]benzoic acid
  SITE 11: note = (S)-2-amino-5-methoxypentanoic acid
  SITE 12: note (S)-2-Amino-3-(5-methyl-1,2,4-oxadiazol-3-yl)propanoic acid
  SITE 13: note = (2R,4S)-4-aminopyrrolidine-2-carboxylic acid
XWFGPXDXGXXXPP

SEQ ID NO: 355 - protein, 14 aa, synthetic construct
  SITE 1: note (2S)-3-[4-(2-acetamidoethoxy)phenyl]-2-amino-propanoic acid
  SITE 3: note = 4-[(2S)-2-amino-2-carboxy-ethyl]benzoic acid
  SITE 5: note = (2S,4R)-4-aminopyrrolidine-2-carboxylic acid
  SITE 6: note = (2S,3S)-2-Amino-3-(3-methylnaphthalen-1-yl)butanoic acid
  SITE 8: note = D-N-methyl-Alanine
  SITE 10: note = 4-[4-[(2S)-2-amino-2-carboxy-ethyl]phenyl]benzoic acid
  SITE 11: note = (S)-2-amino-5-methoxypentanoic acid
  SITE 12: note (S)-2-Amino-3-(5-methyl-1,2,4-oxadiazol-3-yl)propanoic acid
  SITE 13: note = (2R,4S)-4-aminopyrrolidine-2-carboxylic acid
XWFGPXDXGXXXPP

SEQ ID NO: 356 - protein, 14 aa, synthetic construct
  SITE 1: note (2S)-3-[4-(2-acetamidoethoxy)phenyl]-2-amino-propanoic acid
  SITE 3: note = 4-[(2S)-2-amino-2-carboxy-ethyl]benzoic acid
  SITE 5: note = (2S,4R)-4-aminopyrrolidine-2-carboxylic acid
  SITE 6: note = (2S,3S)-2-Amino-3-(3-chloronaphthalen-1-yl)butanoic acid
  SITE 8: note = D-N-methyl-Alanine
  SITE 10: note = 4-[4-[(2S)-2-amino-2-carboxy-ethyl]phenyl]benzoic acid
  SITE 11: note = (S)-2-amino-5-methoxypentanoic acid
  SITE 12: note = (S)-2-amino-5-methoxypentanoic acid
  SITE 13: note = (2R,4S)-4-aminopyrrolidine-2-carboxylic acid
XWFGPXDXGXXXPP

SEQ ID NO: 357 - protein, 14 aa, synthetic construct
  SITE 1: note (2S)-3-[4-(2-acetamidoethoxy)phenyl]-2-amino-propanoic acid
  SITE 3: note = 4-[(2S)-2-amino-2-carboxy-ethyl]benzoic acid
  SITE 5: note = (2S,4R)-4-aminopyrrolidine-2-carboxylic acid
  SITE 6: note = (2S,3S)-2-Amino-3-(3-methylnaphthalen-1-yl)butanoic acid
  SITE 8: note = D-N-methyl-Alanine
  SITE 10: note = 4-[4-[(2S)-2-amino-2-carboxy-ethyl]phenyl]benzoic acid
  SITE 11: note = (S)-2-amino-5-methoxypentanoic acid
  SITE 12: note = (S)-2-amino-5-methoxypentanoic acid
  SITE 13: note = (2R,4S)-4-aminopyrrolidine-2-carboxylic acid
XWFGPXDXGXXXPP

SEQ ID NO: 358 - protein, 14 aa, synthetic construct
  SITE 1: note (2S)-3-[4-(2-acetamidoethoxy)phenyl]-2-amino-propanoic acid
  SITE 3: note = 4-[(2S)-2-amino-2-carboxy-ethyl]benzoic acid
  SITE 5: note = (2S,4R)-4-aminopyrrolidine-2-carboxylic acid
  SITE 6: note = (2S,3S)-2-Amino-3-(3-chloronaphthalen-1-yl)butanoic acid
  SITE 8: note = D-N-methyl-Alanine
  SITE 10: note = 4-[4-[(2S)-2-amino-2-carboxy-ethyl]phenyl]benzoic acid
  SITE 11: note = (S)-2-amino-5-methoxypentanoic acid
  SITE 12: note = (S)-2-Amino-3-(tetrahydro-2H-pyran-4-yl)propanoic acid
  SITE 13: note = (2R,4S)-4-aminopyrrolidine-2-carboxylic acid
XWFGPXDXGXXXPP

SEQ ID NO: 359 - protein, 14 aa, synthetic construct
  SITE 1: note (2S)-3-[4-(2-acetamidoethoxy)phenyl]-2-amino-propanoic acid
  SITE 3: note = 4-[(2S)-2-amino-2-carboxy-ethyl]benzoic acid
  SITE 5: note = (2S,4R)-4-aminopyrrolidine-2-carboxylic acid
  SITE 6: note = (2S,3S)-2-Amino-3-(3-methylnaphthalen-1-yl)butanoic acid
  SITE 8: note = D-N-methyl-Alanine
  SITE 10: note = 4-[4-[(2S)-2-amino-2-carboxy-ethyl]phenyl]benzoic acid
  SITE 11: note = (S)-2-amino-5-methoxypentanoic acid
  SITE 12: note = (S)-2-Amino-3-(tetrahydro-2H-pyran-4-yl)propanoic acid
  SITE 13: note = (2R,4S)-4-aminopyrrolidine-2-carboxylic acid
XWFGPXDXGXXXPP

SEQ ID NO: 360 - protein, 14 aa, synthetic construct
  SITE 1: note (2S)-3-[4-(2-acetamidoethoxy)phenyl]-2-amino-propanoic acid
  SITE 3: note = (S)-2-Amino-3-(4-carbamoylphenyl)propanoic acid
  SITE 5: note = (2S,4R)-4-aminopyrrolidine-2-carboxylic acid
  SITE 6: note = (2S,3S)-2-Amino-3-(3-chloronaphthalen-1-yl)butanoic acid
  SITE 8: note = D-N-methyl-Alanine
  SITE 10: note = 4-[4-[(2S)-2-amino-2-carboxy-ethyl]phenyl]benzoic acid
  SITE 11: note = (S)-2-amino-5-methoxypentanoic acid
  SITE 12: note = (S)-2-amino-5-methoxypentanoic acid
  SITE 13: note = (2R,4S)-4-aminopyrrolidine-2-carboxylic acid
XWFGPXDXGXXXPP

SEQ ID NO: 361 - protein, 14 aa, synthetic construct
  SITE 1: note (2S)-3-[4-(2-acetamidoethoxy)phenyl]-2-amino-propanoic acid
  SITE 3: note = (S)-2-Amino-3-(4-carbamoylphenyl)propanoic acid
  SITE 5: note = (2S,4R)-4-aminopyrrolidine-2-carboxylic acid
  SITE 6: note = (2S,3S)-2-Amino-3-(3-methylnaphthalen-1-yl)butanoic acid
  SITE 8: note = D-N-methyl-Alanine
  SITE 10: note = 4-[4-[(2S)-2-amino-2-carboxy-ethyl]phenyl]benzoic acid
  SITE 11: note = (S)-2-amino-5-methoxypentanoic acid
  SITE 12: note = (S)-2-amino-5-methoxypentanoic acid
  SITE 13: note = (2R,4S)-4-aminopyrrolidine-2-carboxylic acid
XWFGPXDXGXXXPP

SEQ ID NO: 362 - protein, 14 aa, synthetic construct
  SITE 1: note (2S)-3-[4-(2-acetamidoethoxy)phenyl]-2-amino-propanoic acid
  SITE 3: note = (S)-2-Amino-3-(4-carbamoylphenyl)propanoic acid
  SITE 5: note = (2S,4R)-4-aminopyrrolidine-2-carboxylic acid
  SITE 6: note = (2S,3S)-2-Amino-3-(3-chloronaphthalen-1-yl)butanoic acid
  SITE 8: note = D-N-methyl-Alanine
  SITE 10: note = 4-[4-[(2S)-2-amino-2-carboxy-ethyl]phenyl]benzoic acid
  SITE 11: note = (S)-2-amino-5-methoxypentanoic acid
  SITE 12: note = (S)-2-Amino-3-(tetrahydro-2H-pyran-4-yl)propanoic acid
  SITE 13: note = (2R,4S)-4-aminopyrrolidine-2-carboxylic acid
XWFGPXDXGXXXPP

SEQ ID NO: 363 - protein, 14 aa, synthetic construct
  SITE 1: note (2S)-3-[4-(2-acetamidoethoxy)phenyl]-2-amino-propanoic acid
  SITE 3: note = (S)-2-Amino-3-(4-carbamoylphenyl)propanoic acid
  SITE 5: note = (2S,4R)-4-aminopyrrolidine-2-carboxylic acid
  SITE 6: note = (2S,3S)-2-Amino-3-(3-methylnaphthalen-1-yl)butanoic acid
  SITE 8: note = D-N-methyl-Alanine
  SITE 10: note = 4-[4-[(2S)-2-amino-2-carboxy-ethyl]phenyl]benzoic acid
  SITE 11: note = (S)-2-amino-5-methoxypentanoic acid
  SITE 12: note = (S)-2-Amino-3-(tetrahydro-2H-pyran-4-yl)propanoic acid
  SITE 13: note = (2R,4S)-4-aminopyrrolidine-2-carboxylic acid
XWFGPXDXGXXXPP

SEQ ID NO: 364 - protein, 14 aa, synthetic construct
  SITE 1: note (2S)-3-[4-(2-acetamidoethoxy)phenyl]-2-amino-propanoic acid
  SITE 3: note = 4-[(2S)-2-amino-2-carboxy-ethyl]benzoic acid
  SITE 5: note = (2S,4R)-4-aminopyrrolidine-2-carboxylic acid
  SITE 6: note = (2S,3S)-2-Amino-3-(3-methylnaphthalen-1-yl)butanoic acid
  SITE 7: note (S)-2-Amino-3-(5-methyl-1,2,4-oxadiazol-3-yl)propanoic acid
  SITE 8: note = (R)-piperidine-2-carboxylic acid
  SITE 10: note = 4-[4-[(2S)-2-amino-2-carboxy-ethyl]phenyl]benzoic acid
  SITE 11: note = (S)-2-amino-5-methoxypentanoic acid
  SITE 12: note = (S)-2-amino-5-methoxypentanoic acid
  SITE 13: note = (2R,4S)-4-hydroxypyrrolidine-2-carboxylic acid
XWFGPXXXGXXXXP

SEQ ID NO: 365 - protein, 14 aa, synthetic construct
  SITE 1: note (2S)-3-[4-(2-acetamidoethoxy)phenyl]-2-amino-propanoic acid
  SITE 3: note = 4-[(2S)-2-amino-2-carboxy-ethyl]benzoic acid
  SITE 5: note = (2S,4R)-4-aminopyrrolidine-2-carboxylic acid
  SITE 6: note = (2S,3S)-2-Amino-3-(3-methylnaphthalen-1-yl)butanoic acid
  SITE 7: note (S)-2-Amino-3-(5-methyl-1,2,4-oxadiazol-3-yl)propanoic acid
  SITE 8: note = D-N-methyl-Alanine
  SITE 10: note = 4-[4-[(2S)-2-amino-2-carboxy-ethyl]phenyl]benzoic acid
  SITE 11: note = (S)-2-amino-5-methoxypentanoic acid
  SITE 12: note = (S)-2-amino-5-methoxypentanoic acid
  SITE 13: note = (2R,4S)-4-hydroxypyrrolidine-2-carboxylic acid
XWFGPXXXGXXXXP

SEQ ID NO: 366 - protein, 14 aa, synthetic construct
  SITE 1: note (2S)-3-[4-(2-acetamidoethoxy)phenyl]-2-amino-propanoic acid
  SITE 3: note = 4-[(2S)-2-amino-2-carboxy-ethyl]benzoic acid
  SITE 5: note = (2S,4R)-4-aminopyrrolidine-2-carboxylic acid
  SITE 6: note = (2S,3S)-2-Amino-3-(3-methylnaphthalen-1-yl)butanoic acid
  SITE 7: note (S)-2-Amino-3-(5-methyl-1,2,4-oxadiazol-3-yl)propanoic acid
  SITE 8: note = (R)-piperidine-2-carboxylic acid
  SITE 10: note = 4-[4-[(2S)-2-amino-2-carboxy-ethyl]phenyl]benzoic acid
  SITE 11: note = (S)-2-amino-5-methoxypentanoic acid
  SITE 12: note = (S)-2-amino-5-methoxypentanoic acid
  SITE 13: note = (2R,4S)-4-aminopyrrolidine-2-carboxylic acid
XWFGPXXXGXXXPP

SEQ ID NO: 367 - protein, 14 aa, synthetic construct
  SITE 1: note (2S)-3-[4-(2-acetamidoethoxy)phenyl]-2-amino-propanoic acid
  SITE 3: note = 4-[(2S)-2-amino-2-carboxy-ethyl]benzoic acid
  SITE 5: note = (2S,4R)-4-aminopyrrolidine-2-carboxylic acid
  SITE 6: note = (2S,3S)-2-Amino-3-(3-methylnaphthalen-1-yl)butanoic acid
  SITE 7: note (S)-2-Amino-3-(5-methyl-1,2,4-oxadiazol-3-yl)propanoic acid
  SITE 8: note = D-N-methyl-Alanine
  SITE 10: note = 4-[4-[(2S)-2-amino-2-carboxy-ethyl]phenyl]benzoic acid
  SITE 11: note = (S)-2-amino-5-methoxypentanoic acid
  SITE 12: note = (S)-2-amino-5-methoxypentanoic acid
  SITE 13: note = (2R,4S)-4-aminopyrrolidine-2-carboxylic acid
XWFGPXXXGXXXPP

SEQ ID NO: 368 - protein, 14 aa, synthetic construct
  SITE 1: note (2S)-3-[4-(2-acetamidoethoxy)phenyl]-2-amino-propanoic acid
  SITE 3: note = 4-[(2S)-2-amino-2-carboxy-ethyl]benzoic acid
  SITE 5: note = (2S,4R)-4-aminopyrrolidine-2-carboxylic acid
  SITE 6: note = (2S,3S)-2-Amino-3-(3-methylnaphthalen-1-yl)butanoic acid
  SITE 8: note = (R)-piperidine-2-carboxylic acid
  SITE 10: note = 4-[4-[(2S)-2-amino-2-carboxy-ethyl]phenyl]benzoic acid
  SITE 11: note = (S)-2-amino-5-methoxypentanoic acid
  SITE 12: note (S)-2-Amino-3-(5-(methoxymethyl)-1,2,4-oxadiazol-3-yl)propa noic acid
  SITE 13: note = (2R,4S)-4-aminopyrrolidine-2-carboxylic acid
XWFGPXDXGXXXPP

SEQ ID NO: 369 - protein, 14 aa, synthetic construct
  SITE 1: note (2S)-3-[4-(2-acetamidoethoxy)phenyl]-2-amino-propanoic acid
  SITE 3: note = 4-[(2S)-2-amino-2-carboxy-ethyl]benzoic acid
  SITE 5: note = (2S,4R)-4-aminopyrrolidine-2-carboxylic acid
  SITE 6: note = (2S,3S)-2-Amino-3-(3-methylnaphthalen-1-yl)butanoic acid
  SITE 7: note (S)-2-Amino-3-(5-methyl-1,2,4-oxadiazol-3-yl)propanoic acid
  SITE 8: note = (R)-piperidine-2-carboxylic acid
  SITE 10: note = 4-[4-[(2S)-2-amino-2-carboxy-ethyl]phenyl]benzoic acid
  SITE 11: note = (S)-2-amino-5-methoxypentanoic acid
  SITE 13: note = (2R,4S)-4-aminopyrrolidine-2-carboxylic acid
XWFGPXXXGXXAPP

SEQ ID NO: 370 - protein, 14 aa, synthetic construct
  SITE 1: note (2S)-3-[4-(2-acetamidoethoxy)phenyl]-2-amino-propanoic acid
  SITE 3: note = 4-[(2S)-2-amino-2-carboxy-ethyl]benzoic acid
  SITE 5: note = (2S,4R)-4-aminopyrrolidine-2-carboxylic acid
  SITE 6: note = (2S,3S)-2-Amino-3-(3-methylnaphthalen-1-yl)butanoic acid
  SITE 7: note (S)-2-Amino-3-(5-methyl-1,2,4-oxadiazol-3-yl)propanoic acid
  SITE 8: note = D-N-methyl-Alanine
  SITE 10: note = 4-[4-[(2S)-2-amino-2-carboxy-ethyl]phenyl]benzoic acid
  SITE 11: note = (S)-2-amino-5-methoxypentanoic acid
  SITE 13: note = (2R,4S)-4-aminopyrrolidine-2-carboxylic acid
XWFGPXXXGXXAPP

SEQ ID NO: 371 - protein, 14 aa, synthetic construct
  SITE 1: note (2S)-3-[4-(2-acetamidoethoxy)phenyl]-2-amino-propanoic acid
  SITE 3: note = 4-[(2S)-2-amino-2-carboxy-ethyl]benzoic acid
  SITE 5: note = (2S,4R)-4-aminopyrrolidine-2-carboxylic acid
  SITE 6: note = (2S,3S)-2-Amino-3-(3-methylnaphthalen-1-yl)butanoic acid
  SITE 8: note = (R)-piperidine-2-carboxylic acid
  SITE 10: note = 4-[4-[(2S)-2-amino-2-carboxy-ethyl]phenyl]benzoic acid
  SITE 11: note = (S)-2-amino-5-methoxypentanoic acid
  SITE 12: note (S)-2-Amino-3-(5-methyl-1,2,4-oxadiazol-3-yl)propanoic acid
  SITE 13: note = (2R,4S)-4-hydroxypyrrolidine-2-carboxylic acid
XWFGPXDXGXXXXP

SEQ ID NO: 372 - protein, 14 aa, synthetic construct
  SITE 1: note (2S)-3-[4-(2-acetamidoethoxy)phenyl]-2-amino-propanoic acid
  SITE 3: note = 4-[(2S)-2-amino-2-carboxy-ethyl]benzoic acid
  SITE 5: note = (2S,4R)-4-aminopyrrolidine-2-carboxylic acid
  SITE 6: note = (2S,3S)-2-Amino-3-(3-methylnaphthalen-1-yl)butanoic acid
  SITE 8: note = (R)-piperidine-2-carboxylic acid
  SITE 10: note = 4-[4-[(2S)-2-amino-2-carboxy-ethyl]phenyl]benzoic acid
  SITE 11: note = (S)-2-amino-5-methoxypentanoic acid
  SITE 12: note (S)-2-Amino-3-(5-(methoxymethyl)-1,2,4-oxadiazol-3-yl)propa noic acid
  SITE 13: note = (2R,4S)-4-hydroxypyrrolidine-2-carboxylic acid
XWFGPXDXGXXXXP

SEQ ID NO: 373 - protein, 14 aa, synthetic construct
  SITE 1: note (2S)-3-[4-(2-acetamidoethoxy)phenyl]-2-amino-propanoic acid
  SITE 3: note = 4-[(2S)-2-amino-2-carboxy-ethyl]benzoic acid
  SITE 5: note = (2S,4R)-4-aminopyrrolidine-2-carboxylic acid
  SITE 6: note = (2S,3S)-2-Amino-3-(3-methylnaphthalen-1-yl)butanoic acid
  SITE 7: note (S)-2-Amino-3-(5-methyl-1,2,4-oxadiazol-3-yl)propanoic acid
  SITE 8: note = (R)-piperidine-2-carboxylic acid
  SITE 10: note = 4-[4-[(2S)-2-amino-2-carboxy-ethyl]phenyl]benzoic acid
  SITE 11: note = (S)-2-amino-5-methoxypentanoic acid
  SITE 13: note = (2R,4S)-4-hydroxypyrrolidine-2-carboxylic acid
XWFGPXXXGXXAXP

SEQ ID NO: 374 - protein, 14 aa, synthetic construct
  SITE 1: note (2S)-3-[4-(2-acetamidoethoxy)phenyl]-2-amino-propanoic acid
  SITE 3: note = 4-[(2S)-2-amino-2-carboxy-ethyl]benzoic acid
  SITE 5: note = (2S,4R)-4-aminopyrrolidine-2-carboxylic acid
  SITE 6: note = (2S,3S)-2-Amino-3-(3-methylnaphthalen-1-yl)butanoic acid
  SITE 7: note (S)-2-Amino-3-(5-methyl-1,2,4-oxadiazol-3-yl)propanoic acid
  SITE 8: note = D-N-methyl-Alanine
  SITE 10: note = 4-[4-[(2S)-2-amino-2-carboxy-ethyl]phenyl]benzoic acid
  SITE 11: note = (S)-2-amino-5-methoxypentanoic acid
  SITE 13: note = (2R,4S)-4-hydroxypyrrolidine-2-carboxylic acid
XWFGPXXXGXXAXP

SEQ ID NO: 375 - protein, 14 aa, synthetic construct
  SITE 1: note (2S)-3-[4-(2-acetamidoethoxy)phenyl]-2-amino-propanoic acid
  SITE 3: note = 4-[(2S)-2-amino-2-carboxy-ethyl]benzoic acid
  SITE 5: note = (2S,4R)-4-aminopyrrolidine-2-carboxylic acid
  SITE 6: note = (2S,3S)-2-Amino-3-(3-chloronaphthalen-1-yl)butanoic acid
  SITE 7: note = N4,N4-dimethyl-L-asparagine
  SITE 8: note = D-N-methyl-Alanine
  SITE 10: note = 4-[4-[(2S)-2-amino-2-carboxy-ethyl]phenyl]benzoic acid
  SITE 11: note = (S)-2-amino-5-methoxypentanoic acid
  SITE 13: note = (2R,4S)-4-aminopyrrolidine-2-carboxylic acid
XWFGPXXXGXXAPP

SEQ ID NO: 376 - protein, 14 aa, synthetic construct
  SITE 1: note (2S)-3-[4-(2-acetamidoethoxy)phenyl]-2-amino-propanoic acid
  SITE 3: note = 4-[(2S)-2-amino-2-carboxy-ethyl]benzoic acid
  SITE 5: note = (2S,4R)-4-aminopyrrolidine-2-carboxylic acid
  SITE 6: note = (2S,3S)-2-Amino-3-(3-methylnaphthalen-1-yl)butanoic acid
  SITE 7: note = N4,N4-dimethyl-L-asparagine
  SITE 8: note = D-N-methyl-Alanine
  SITE 10: note = 4-[4-[(2S)-2-amino-2-carboxy-ethyl]phenyl]benzoic acid
  SITE 11: note = (S)-2-amino-5-methoxypentanoic acid
  SITE 13: note = (2R,4S)-4-aminopyrrolidine-2-carboxylic acid
XWFGPXXXGXXAPP

SEQ ID NO: 377 - protein, 14 aa, synthetic construct
  SITE 1: note (2S)-3-[4-(2-acetamidoethoxy)phenyl]-2-amino-propanoic acid
  SITE 3: note = 4-[(2S)-2-amino-2-carboxy-ethyl]benzoic acid
  SITE 5: note = (2S,4R)-4-aminopyrrolidine-2-carboxylic acid
  SITE 6: note = (2S,3S)-2-Amino-3-(3-chloronaphthalen-1-yl)butanoic acid
  SITE 7: note = N4,N4-dimethyl-L-asparagine
  SITE 8: note = (R)-piperidine-2-carboxylic acid
  SITE 10: note = 4-[4-[(2S)-2-amino-2-carboxy-ethyl]phenyl]benzoic acid
  SITE 11: note = (S)-2-amino-5-methoxypentanoic acid
  SITE 13: note = (2R,4S)-4-aminopyrrolidine-2-carboxylic acid
XWFGPXXXGXXAPP

SEQ ID NO: 378 - protein, 14 aa, synthetic construct
  SITE 1: note (2S)-3-[4-(2-acetamidoethoxy)phenyl]-2-amino-propanoic acid
  SITE 3: note = 4-[(2S)-2-amino-2-carboxy-ethyl]benzoic acid
  SITE 5: note = (2S,4R)-4-aminopyrrolidine-2-carboxylic acid
  SITE 6: note = (2S,3S)-2-Amino-3-(3-methylnaphthalen-1-yl)butanoic acid
  SITE 7: note = N4,N4-dimethyl-L-asparagine
  SITE 8: note = (R)-piperidine-2-carboxylic acid
  SITE 10: note = 4-[4-[(2S)-2-amino-2-carboxy-ethyl]phenyl]benzoic acid
  SITE 11: note = (S)-2-amino-5-methoxypentanoic acid
  SITE 13: note = (2R,4S)-4-aminopyrrolidine-2-carboxylic acid
XWFGPXXXGXXAPP

SEQ ID NO: 379 - protein, 14 aa, synthetic construct
  SITE 1: note (2S)-3-[4-(2-acetamidoethoxy)phenyl]-2-amino-propanoic acid
  SITE 3: note = (S)-2-Amino-3-(4-carbamoylphenyl)propanoic acid
  SITE 5: note = (2S,4R)-4-aminopyrrolidine-2-carboxylic acid
  SITE 6: note = (2S,3S)-2-Amino-3-(3-chloronaphthalen-1-yl)butanoic acid
  SITE 8: note = (R)-piperidine-2-carboxylic acid
  SITE 10: note = 4-[4-[(2S)-2-amino-2-carboxy-ethyl]phenyl]benzoic acid
  SITE 11: note = (S)-2-amino-5-methoxypentanoic acid
  SITE 12: note = (S)-2-amino-5-methoxypentanoic acid
  SITE 13: note = (2R,4S)-4-hydroxypyrrolidine-2-carboxylic acid
XWFGPXDXGXXXXP

SEQ ID NO: 380 - protein, 14 aa, synthetic construct
  SITE 1: note (2S)-3-[4-(2-acetamidoethoxy)phenyl]-2-amino-propanoic acid
  SITE 3: note = (S)-2-Amino-3-(4-carbamoylphenyl)propanoic acid
  SITE 5: note = (2S,4R)-4-aminopyrrolidine-2-carboxylic acid
  SITE 6: note = (2S,3S)-2-Amino-3-(3-methylnaphthalen-1-yl)butanoic acid
  SITE 8: note = (R)-piperidine-2-carboxylic acid
  SITE 10: note = 4-[4-[(2S)-2-amino-2-carboxy-ethyl]phenyl]benzoic acid
  SITE 11: note = (S)-2-amino-5-methoxypentanoic acid
  SITE 12: note = (S)-2-amino-5-methoxypentanoic acid
  SITE 13: note = (2R,4S)-4-hydroxypyrrolidine-2-carboxylic acid
XWFGPXDXGXXXXP

SEQ ID NO: 381 - protein, 14 aa, synthetic construct
  SITE 1: note (2S)-3-[4-(2-acetamidoethoxy)phenyl]-2-amino-propanoic acid
  SITE 3: note = (S)-2-Amino-3-(4-carbamoylphenyl)propanoic acid
  SITE 5: note = (2S,4R)-4-aminopyrrolidine-2-carboxylic acid
  SITE 6: note = (2S,3S)-2-Amino-3-(3-chloronaphthalen-1-yl)butanoic acid
  SITE 8: note = (R)-piperidine-2-carboxylic acid
  SITE 10: note = 4-[4-[(2S)-2-amino-2-carboxy-ethyl]phenyl]benzoic acid
  SITE 11: note = (S)-2-amino-5-methoxypentanoic acid
  SITE 13: note = (2R,4S)-4-hydroxypyrrolidine-2-carboxylic acid
XWFGPXDXGXXAXP

SEQ ID NO: 382 - protein, 14 aa, synthetic construct
  SITE 1: note (2S)-3-[4-(2-acetamidoethoxy)phenyl]-2-amino-propanoic acid
  SITE 3: note = (S)-2-Amino-3-(4-carbamoylphenyl)propanoic acid
  SITE 5: note = (2S,4R)-4-aminopyrrolidine-2-carboxylic acid
  SITE 6: note = (2S,3S)-2-Amino-3-(3-methylnaphthalen-1-yl)butanoic acid
  SITE 8: note = (R)-piperidine-2-carboxylic acid
  SITE 10: note = 4-[4-[(2S)-2-amino-2-carboxy-ethyl]phenyl]benzoic acid
  SITE 11: note = (S)-2-amino-5-methoxypentanoic acid
  SITE 13: note = (2R,4S)-4-hydroxypyrrolidine-2-carboxylic acid
XWFGPXDXGXXAXP

SEQ ID NO: 383 - protein, 14 aa, synthetic construct
  SITE 1: note (2S)-3-[4-(2-acetamidoethoxy)phenyl]-2-amino-propanoic acid
  SITE 3: note = (S)-2-Amino-3-(4-carbamoylphenyl)propanoic acid
  SITE 5: note = (2S,4R)-4-aminopyrrolidine-2-carboxylic acid
  SITE 6: note = (2S,3S)-2-Amino-3-(3-chloronaphthalen-1-yl)butanoic acid
  SITE 8: note = (R)-piperidine-2-carboxylic acid
  SITE 10: note = 4-[4-[(2S)-2-amino-2-carboxy-ethyl]phenyl]benzoic acid
  SITE 11: note = (S)-2-amino-5-methoxypentanoic acid
  SITE 12: note = (S)-2-amino-5-methoxypentanoic acid
  SITE 13: note = (2R,4S)-4-aminopyrrolidine-2-carboxylic acid
XWFGPXDXGXXXPP

SEQ ID NO: 384 - protein, 14 aa, synthetic construct
  SITE 1: note (2S)-3-[4-(2-acetamidoethoxy)phenyl]-2-amino-propanoic acid
  SITE 3: note = (S)-2-Amino-3-(4-carbamoylphenyl)propanoic acid
  SITE 5: note = (2S,4R)-4-aminopyrrolidine-2-carboxylic acid
  SITE 6: note = (2S,3S)-2-Amino-3-(3-methylnaphthalen-1-yl)butanoic acid
  SITE 8: note = (R)-piperidine-2-carboxylic acid
  SITE 10: note = 4-[4-[(2S)-2-amino-2-carboxy-ethyl]phenyl]benzoic acid
  SITE 11: note = (S)-2-amino-5-methoxypentanoic acid
  SITE 12: note = (S)-2-amino-5-methoxypentanoic acid
  SITE 13: note = (2R,4S)-4-aminopyrrolidine-2-carboxylic acid
XWFGPXDXGXXXPP

SEQ ID NO: 385 - protein, 14 aa, synthetic construct
  SITE 1: note (2S)-3-[4-(2-acetamidoethoxy)phenyl]-2-amino-propanoic acid
  SITE 3: note = (S)-2-Amino-3-(4-carbamoylphenyl)propanoic acid
  SITE 5: note = (2S,4R)-4-aminopyrrolidine-2-carboxylic acid
  SITE 6: note = (2S,3S)-2-Amino-3-(3-chloronaphthalen-1-yl)butanoic acid
  SITE 8: note = (R)-piperidine-2-carboxylic acid
  SITE 10: note = 4-[4-[(2S)-2-amino-2-carboxy-ethyl]phenyl]benzoic acid
  SITE 11: note = (S)-2-amino-5-methoxypentanoic acid
  SITE 13: note = (2R,4S)-4-aminopyrrolidine-2-carboxylic acid
XWFGPXDXGXXAPP

SEQ ID NO: 386 - protein, 14 aa, synthetic construct
  SITE 1: note (2S)-3-[4-(2-acetamidoethoxy)phenyl]-2-amino-propanoic acid
  SITE 3: note = 4-[(2S)-2-amino-2-carboxy-ethyl]benzoic acid
  SITE 5: note = (2S,4R)-4-aminopyrrolidine-2-carboxylic acid
  SITE 6: note = (2S,3S)-2-Amino-3-(3-chloronaphthalen-1-yl)butanoic acid
  SITE 8: note = (R)-piperidine-2-carboxylic acid
  SITE 10: note = 4-[4-[(2S)-2-amino-2-carboxy-ethyl]phenyl]benzoic acid
  SITE 11: note = (2S)-2-amino-3-(4-pyridyl)propanoic acid
  SITE 13: note = (2R,4S)-4-aminopyrrolidine-2-carboxylic acid
XWFGPXDXGXXAPP

SEQ ID NO: 387 - protein, 14 aa, synthetic construct
  SITE 1: note (2S)-3-[4-(2-acetamidoethoxy)phenyl]-2-amino-propanoic acid
  SITE 3: note = 4-[(2S)-2-amino-2-carboxy-ethyl]benzoic acid
  SITE 5: note = (2S,4R)-4-aminopyrrolidine-2-carboxylic acid
  SITE 6: note = (2S,3S)-2-Amino-3-(3-methylnaphthalen-1-yl)butanoic acid
  SITE 8: note = (R)-piperidine-2-carboxylic acid
  SITE 10: note = 4-[4-[(2S)-2-amino-2-carboxy-ethyl]phenyl]benzoic acid
  SITE 11: note = (2S)-2-amino-3-(4-pyridyl)propanoic acid
  SITE 13: note = (2R,4S)-4-aminopyrrolidine-2-carboxylic acid
XWFGPXDXGXXAPP

SEQ ID NO: 388 - protein, 14 aa, synthetic construct
  SITE 1: note (2S)-3-[4-(2-acetamidoethoxy)phenyl]-2-amino-propanoic acid
  SITE 3: note = 4-[(2S)-2-amino-2-carboxy-ethyl]benzoic acid
  SITE 5: note = (2S,4R)-4-aminopyrrolidine-2-carboxylic acid
  SITE 6: note = (2S,3S)-2-Amino-3-(3-chloronaphthalen-1-yl)butanoic acid
  SITE 8: note = (R)-piperidine-2-carboxylic acid
  SITE 10: note = 4-[4-[(2S)-2-amino-2-carboxy-ethyl]phenyl]benzoic acid
  SITE 11: note = (2S)-2-amino-3-(4-pyridyl)propanoic acid
  SITE 13: note = (2R,4S)-4-hydroxypyrrolidine-2-carboxylic acid
XWFGPXDXGXXAXP

SEQ ID NO: 389 - protein, 14 aa, synthetic construct
  SITE 1: note (2S)-3-[4-(2-acetamidoethoxy)phenyl]-2-amino-propanoic acid
  SITE 3: note = 4-[(2S)-2-amino-2-carboxy-ethyl]benzoic acid
  SITE 5: note = (2S,4R)-4-aminopyrrolidine-2-carboxylic acid
  SITE 6: note = (2S,3S)-2-Amino-3-(3-methylnaphthalen-1-yl)butanoic acid
  SITE 8: note = (R)-piperidine-2-carboxylic acid
  SITE 10: note = 4-[4-[(2S)-2-amino-2-carboxy-ethyl]phenyl]benzoic acid
  SITE 11: note = (2S)-2-amino-3-(4-pyridyl)propanoic acid
  SITE 13: note = (2R,4S)-4-hydroxypyrrolidine-2-carboxylic acid
XWFGPXDXGXXAXP

SEQ ID NO: 390 - protein, 14 aa, synthetic construct
  SITE 1: note (2S)-3-[4-(2-acetamidoethoxy)phenyl]-2-amino-propanoic acid
  SITE 3: note = 4-[(2S)-2-amino-2-carboxy-ethyl]benzoic acid
  SITE 5: note = (2S,4R)-4-aminopyrrolidine-2-carboxylic acid
  SITE 6: note = (2S,3S)-2-Amino-3-(3-chloronaphthalen-1-yl)butanoic acid
  SITE 8: note = (R)-piperidine-2-carboxylic acid
  SITE 10: note = 4-[4-[(2S)-2-amino-2-carboxy-ethyl]phenyl]benzoic acid
  SITE 11: note (S)-2-Amino-3-(5-(methoxymethyl)-1,2,4-oxadiazol-3-yl)propa noic acid
  SITE 12: note = (S)-2-amino-5-methoxypentanoic acid
  SITE 13: note = (2R,4S)-4-aminopyrrolidine-2-carboxylic acid
XWFGPXDXGXXXPP

SEQ ID NO: 391 - protein, 14 aa, synthetic construct
  SITE 1: note (2S)-3-[4-(2-acetamidoethoxy)phenyl]-2-amino-propanoic acid
  SITE 3: note = 4-[(2S)-2-amino-2-carboxy-ethyl]benzoic acid
  SITE 5: note = (2S,4R)-4-aminopyrrolidine-2-carboxylic acid
  SITE 6: note = (2S,3S)-2-Amino-3-(3-methylnaphthalen-1-yl)butanoic acid
  SITE 8: note = (R)-piperidine-2-carboxylic acid
  SITE 10: note = 4-[4-[(2S)-2-amino-2-carboxy-ethyl]phenyl]benzoic acid
  SITE 11: note (S)-2-Amino-3-(5-(methoxymethyl)-1,2,4-oxadiazol-3-yl)propa noic acid
  SITE 12: note = (S)-2-amino-5-methoxypentanoic acid
  SITE 13: note = (2R,4S)-4-aminopyrrolidine-2-carboxylic acid
XWFGPXDXGXXXPP

SEQ ID NO: 392 - protein, 14 aa, synthetic construct
  SITE 1: note (2S)-3-[4-(2-acetamidoethoxy)phenyl]-2-amino-propanoic acid
  SITE 3: note = 4-[(2S)-2-amino-2-carboxy-ethyl]benzoic acid
  SITE 5: note = (2S,4R)-4-aminopyrrolidine-2-carboxylic acid
  SITE 6: note = (2S,3S)-2-Amino-3-(3-chloronaphthalen-1-yl)butanoic acid
  SITE 8: note = (R)-piperidine-2-carboxylic acid
  SITE 10: note = 4-[4-[(2S)-2-amino-2-carboxy-ethyl]phenyl]benzoic acid
  SITE 11: note (S)-2-Amino-3-(5-(methoxymethyl)-1,2,4-oxadiazol-3-yl)propa noic acid
  SITE 13: note = (2R,4S)-4-aminopyrrolidine-2-carboxylic acid
XWFGPXDXGXXAPP

SEQ ID NO: 393 - protein, 14 aa, synthetic construct
  SITE 1: note (2S)-3-[4-(2-acetamidoethoxy)phenyl]-2-amino-propanoic acid
  SITE 3: note = 4-[(2S)-2-amino-2-carboxy-ethyl]benzoic acid
  SITE 5: note = (2S,4R)-4-aminopyrrolidine-2-carboxylic acid
  SITE 6: note = (2S,3S)-2-Amino-3-(3-methylnaphthalen-1-yl)butanoic acid
  SITE 8: note = (R)-piperidine-2-carboxylic acid
  SITE 10: note = 4-[4-[(2S)-2-amino-2-carboxy-ethyl]phenyl]benzoic acid
  SITE 11: note (S)-2-Amino-3-(5-(methoxymethyl)-1,2,4-oxadiazol-3-yl)propa noic acid
  SITE 13: note = (2R,4S)-4-aminopyrrolidine-2-carboxylic acid
XWFGPXDXGXXAPP

SEQ ID NO: 394 - protein, 14 aa, synthetic construct
  SITE 1: note (2S)-3-[4-(2-acetamidoethoxy)phenyl]-2-amino-propanoic acid
  SITE 3: note = 4-[(2S)-2-amino-2-carboxy-ethyl]benzoic acid
  SITE 5: note = (2S,4R)-4-aminopyrrolidine-2-carboxylic acid
  SITE 6: note = (2S,3S)-2-Amino-3-(3-chloronaphthalen-1-yl)butanoic acid
  SITE 8: note = (R)-piperidine-2-carboxylic acid
  SITE 10: note = 4-[4-[(2S)-2-amino-2-carboxy-ethyl]phenyl]benzoic acid
  SITE 11: note (S)-2-Amino-3-(5-(methoxymethyl)-1,2,4-oxadiazol-3-yl)propa noic acid
  SITE 12: note = (S)-2-amino-5-methoxypentanoic acid
  SITE 13: note = (2R,4S)-4-hydroxypyrrolidine-2-carboxylic acid
XWFGPXDXGXXXXP

SEQ ID NO: 395 - protein, 14 aa, synthetic construct
  SITE 1: note (2S)-3-[4-(2-acetamidoethoxy)phenyl]-2-amino-propanoic acid
  SITE 3: note = 4-[(2S)-2-amino-2-carboxy-ethyl]benzoic acid
  SITE 5: note = (2S,4R)-4-aminopyrrolidine-2-carboxylic acid
  SITE 6: note = (2S,3S)-2-Amino-3-(3-methylnaphthalen-1-yl)butanoic acid
  SITE 8: note = (R)-piperidine-2-carboxylic acid
  SITE 10: note = 4-[4-[(2S)-2-amino-2-carboxy-ethyl]phenyl]benzoic acid
  SITE 11: note (S)-2-Amino-3-(5-(methoxymethyl)-1,2,4-oxadiazol-3-yl)propa noic acid
  SITE 12: note = (S)-2-amino-5-methoxypentanoic acid
  SITE 13: note = (2R,4S)-4-hydroxypyrrolidine-2-carboxylic acid
XWFGPXDXGXXXXP

SEQ ID NO: 396 - protein, 14 aa, synthetic construct
  SITE 1: note (2S)-3-[4-(2-acetamidoethoxy)phenyl]-2-amino-propanoic acid
  SITE 3: note = 4-[(2S)-2-amino-2-carboxy-ethyl]benzoic acid
  SITE 5: note = (2S,4R)-4-aminopyrrolidine-2-carboxylic acid
  SITE 6: note = (2S,3S)-2-Amino-3-(3-chloronaphthalen-1-yl)butanoic acid
  SITE 8: note = (R)-piperidine-2-carboxylic acid
  SITE 10: note = 4-[4-[(2S)-2-amino-2-carboxy-ethyl]phenyl]benzoic acid
  SITE 11: note (S)-2-Amino-3-(5-(methoxymethyl)-1,2,4-oxadiazol-3-yl)propa noic acid
  SITE 13: note = (2R,4S)-4-hydroxypyrrolidine-2-carboxylic acid
XWFGPXDXGXXAXP

SEQ ID NO: 397 - protein, 14 aa, synthetic construct
  SITE 1: note (2S)-3-[4-(2-acetamidoethoxy)phenyl]-2-amino-propanoic acid
  SITE 3: note = 4-[(2S)-2-amino-2-carboxy-ethyl]benzoic acid
  SITE 5: note = (2S,4R)-4-aminopyrrolidine-2-carboxylic acid
  SITE 6: note = (2S,3S)-2-Amino-3-(3-methylnaphthalen-1-yl)butanoic acid
  SITE 8: note = (R)-piperidine-2-carboxylic acid
  SITE 10: note = 4-[4-[(2S)-2-amino-2-carboxy-ethyl]phenyl]benzoic acid
  SITE 11: note (S)-2-Amino-3-(5-(methoxymethyl)-1,2,4-oxadiazol-3-yl)propa noic acid
  SITE 13: note = (2R,4S)-4-hydroxypyrrolidine-2-carboxylic acid
XWFGPXDXGXXAXP

SEQ ID NO: 398 - protein, 14 aa, synthetic construct
  SITE 1: note (2S)-3-[4-(2-acetamidoethoxy)phenyl]-2-amino-propanoic acid
  SITE 3: note = 4-[(2S)-2-amino-2-carboxy-ethyl]benzoic acid
  SITE 5: note = (2S,4R)-4-aminopyrrolidine-2-carboxylic acid
  SITE 6: note = (2S,3S)-2-Amino-3-(3-chloronaphthalen-1-yl)butanoic acid
  SITE 8: note = (R)-piperidine-2-carboxylic acid
  SITE 10: note = 4-[4-[(2S)-2-amino-2-carboxy-ethyl]phenyl]benzoic acid
  SITE 11: note = N4,N4-dimethyl-L-asparagine
  SITE 12: note = (S)-2-amino-5-methoxypentanoic acid
  SITE 13: note = (2R,4S)-4-hydroxypyrrolidine-2-carboxylic acid
XWFGPXDXGXXXXP

SEQ ID NO: 399 - protein, 14 aa, synthetic construct
  SITE 1: note (2S)-3-[4-(2-acetamidoethoxy)phenyl]-2-amino-propanoic acid
  SITE 3: note = 4-[(2S)-2-amino-2-carboxy-ethyl]benzoic acid
  SITE 5: note = (2S,4R)-4-aminopyrrolidine-2-carboxylic acid
  SITE 6: note = (2S,3S)-2-Amino-3-(3-methylnaphthalen-1-yl)butanoic acid
  SITE 8: note = (R)-piperidine-2-carboxylic acid
  SITE 10: note = 4-[4-[(2S)-2-amino-2-carboxy-ethyl]phenyl]benzoic acid
  SITE 11: note = N4,N4-dimethyl-L-asparagine
  SITE 12: note = (S)-2-amino-5-methoxypentanoic acid
  SITE 13: note = (2R,4S)-4-hydroxypyrrolidine-2-carboxylic acid
XWFGPXDXGXXXXP

SEQ ID NO: 400 - protein, 14 aa, synthetic construct
  SITE 1: note (2S)-3-[4-(2-acetamidoethoxy)phenyl]-2-amino-propanoic acid
  SITE 3: note = 4-[(2S)-2-amino-2-carboxy-ethyl]benzoic acid
  SITE 5: note = (2S,4R)-4-aminopyrrolidine-2-carboxylic acid
  SITE 6: note = (2S,3S)-2-Amino-3-(3-chloronaphthalen-1-yl)butanoic acid
  SITE 8: note = (R)-piperidine-2-carboxylic acid
  SITE 10: note = 4-[4-[(2S)-2-amino-2-carboxy-ethyl]phenyl]benzoic acid
  SITE 11: note = N4,N4-dimethyl-L-asparagine
  SITE 13: note = (2R,4S)-4-hydroxypyrrolidine-2-carboxylic acid
XWFGPXDXGXXAXP

SEQ ID NO: 401 - protein, 14 aa, synthetic construct
  SITE 1: note (2S)-3-[4-(2-acetamidoethoxy)phenyl]-2-amino-propanoic acid
  SITE 3: note = 4-[(2S)-2-amino-2-carboxy-ethyl]benzoic acid
  SITE 5: note = (2S,4R)-4-aminopyrrolidine-2-carboxylic acid
  SITE 6: note = (2S,3S)-2-Amino-3-(3-methylnaphthalen-1-yl)butanoic acid
  SITE 8: note = (R)-piperidine-2-carboxylic acid
  SITE 10: note = 4-[4-[(2S)-2-amino-2-carboxy-ethyl]phenyl]benzoic acid
  SITE 11: note = N4,N4-dimethyl-L-asparagine
  SITE 13: note = (2R,4S)-4-hydroxypyrrolidine-2-carboxylic acid
XWFGPXDXGXXAXP

SEQ ID NO: 402 - protein, 14 aa, synthetic construct
  SITE 1: note (2S)-3-[4-(2-acetamidoethoxy)phenyl]-2-amino-propanoic acid
  SITE 3: note = 4-[(2S)-2-amino-2-carboxy-ethyl]benzoic acid
  SITE 5: note = (2S,4R)-4-aminopyrrolidine-2-carboxylic acid
  SITE 6: note = (2S,3S)-2-Amino-3-(3-chloronaphthalen-1-yl)butanoic acid
  SITE 8: note = (R)-piperidine-2-carboxylic acid
  SITE 10: note = 4-[4-[(2S)-2-amino-2-carboxy-ethyl]phenyl]benzoic acid
  SITE 11: note = N4,N4-dimethyl-L-asparagine
  SITE 12: note = (S)-2-amino-5-methoxypentanoic acid
  SITE 13: note = (2R,4S)-4-aminopyrrolidine-2-carboxylic acid
XWFGPXDXGXXXPP

SEQ ID NO: 403 - protein, 14 aa, synthetic construct
  SITE 1: note (2S)-3-[4-(2-acetamidoethoxy)phenyl]-2-amino-propanoic acid
  SITE 3: note = 4-[(2S)-2-amino-2-carboxy-ethyl]benzoic acid
  SITE 5: note = (2S,4R)-4-aminopyrrolidine-2-carboxylic acid
  SITE 6: note = (2S,3S)-2-Amino-3-(3-methylnaphthalen-1-yl)butanoic acid
  SITE 8: note = (R)-piperidine-2-carboxylic acid
  SITE 10: note = 4-[4-[(2S)-2-amino-2-carboxy-ethyl]phenyl]benzoic acid
  SITE 11: note = N4,N4-dimethyl-L-asparagine
  SITE 12: note = (S)-2-amino-5-methoxypentanoic acid
  SITE 13: note = (2R,4S)-4-aminopyrrolidine-2-carboxylic acid
XWFGPXDXGXXXPP

SEQ ID NO: 404 - protein, 14 aa, synthetic construct
  SITE 1: note (2S)-3-[4-(2-acetamidoethoxy)phenyl]-2-amino-propanoic acid
  SITE 3: note = 4-[(2S)-2-amino-2-carboxy-ethyl]benzoic acid
  SITE 5: note = (2S,4R)-4-aminopyrrolidine-2-carboxylic acid
  SITE 6: note = (2S,3S)-2-Amino-3-(3-chloronaphthalen-1-yl)butanoic acid
  SITE 8: note = (R)-piperidine-2-carboxylic acid
  SITE 10: note = 4-[4-[(2S)-2-amino-2-carboxy-ethyl]phenyl]benzoic acid
  SITE 11: note = N4,N4-dimethyl-L-asparagine
  SITE 13: note = (2R,4S)-4-aminopyrrolidine-2-carboxylic acid
XWFGPXDXGXXAPP

SEQ ID NO: 405 - protein, 14 aa, synthetic construct
  SITE 1: note (2S)-3-[4-(2-acetamidoethoxy)phenyl]-2-amino-propanoic acid
  SITE 3: note = 4-[(2S)-2-amino-2-carboxy-ethyl]benzoic acid
  SITE 5: note = (2S,4R)-4-aminopyrrolidine-2-carboxylic acid
  SITE 6: note = (2S,3S)-2-Amino-3-(3-methylnaphthalen-1-yl)butanoic acid
  SITE 8: note = (R)-piperidine-2-carboxylic acid
  SITE 10: note = 4-[4-[(2S)-2-amino-2-carboxy-ethyl]phenyl]benzoic acid
  SITE 11: note = N4,N4-dimethyl-L-asparagine
  SITE 13: note = (2R,4S)-4-aminopyrrolidine-2-carboxylic acid
XWFGPXDXGXXAPP

SEQ ID NO: 406 - protein, 14 aa, synthetic construct
  SITE 1: note (2S)-3-[4-(2-acetamidoethoxy)phenyl]-2-amino-propanoic acid
  SITE 3: note = 4-[(2S)-2-amino-2-carboxy-ethyl]benzoic acid
  SITE 5: note = (2S,4R)-4-aminopyrrolidine-2-carboxylic acid
  SITE 6: note = (2S,3S)-2-Amino-3-(3-chloronaphthalen-1-yl)butanoic acid
  SITE 8: note = (R)-piperidine-2-carboxylic acid
  SITE 10: note = 4-[4-[(2S)-2-amino-2-carboxy-ethyl]phenyl]benzoic acid
  SITE 11: note (S)-2-(2-(3-((5-amino-5-carboxypentyl)amino)-3-oxopropoxy)e thoxy)-N,N,N-trimethylethan-1-aminium
  SITE 13: note = (2R,4S)-4-aminopyrrolidine-2-carboxylic acid
XWFGPXDXGXXAPP

SEQ ID NO: 407 - protein, 14 aa, synthetic construct
  SITE 1: note (2S)-3-[4-(2-acetamidoethoxy)phenyl]-2-amino-propanoic acid
  SITE 3: note = 4-[(2S)-2-amino-2-carboxy-ethyl]benzoic acid
  SITE 5: note = (2S,4R)-4-aminopyrrolidine-2-carboxylic acid
  SITE 6: note = (2S,3S)-2-Amino-3-(3-chloronaphthalen-1-yl)butanoic acid
  SITE 8: note = (R)-piperidine-2-carboxylic acid
  SITE 10: note = 4-[4-[(2S)-2-amino-2-carboxy-ethyl]phenyl]benzoic acid
  SITE 11: note (S)-21-Amino-21-carboxy-N,N,N-trimethyl-15-oxo-3,6,9,12-tet raoxa-16-azahenicosan-1-aminium
  SITE 13: note = (2R,4S)-4-aminopyrrolidine-2-carboxylic acid
XWFGPXDXGXXAPP

SEQ ID NO: 408 - protein, 14 aa, synthetic construct
  SITE 1: note (2S)-3-[4-(2-acetamidoethoxy)phenyl]-2-amino-propanoic acid
  SITE 3: note = 4-[(2S)-2-amino-2-carboxy-ethyl]benzoic acid
  SITE 5: note = (2S,4R)-4-aminopyrrolidine-2-carboxylic acid
  SITE 6: note = (2S,3S)-2-Amino-3-(3-chloronaphthalen-1-yl)butanoic acid
  SITE 8: note = (R)-piperidine-2-carboxylic acid
  SITE 10: note = 4-[4-[(2S)-2-amino-2-carboxy-ethyl]phenyl]benzoic acid
  SITE 11: note (S)-2-(2-(3-((5-amino-5-carboxypentyl)amino)-3-oxopropoxy)e thoxy)-N,N,N-trimethylethan-1-aminium
  SITE 12: note = (S)-2-amino-5-methoxypentanoic acid
  SITE 13: note = (2R,4S)-4-aminopyrrolidine-2-carboxylic acid
  SITE 14: note = (2S,4R)-4-(4-(pyrimidin-5-yl)benzyl) pyrrolidine-2-carboxylic acid
XWFGPXDXGXXXPX

SEQ ID NO: 409 - protein, 14 aa, synthetic construct
  SITE 1: note (2S)-3-[4-(2-acetamidoethoxy)phenyl]-2-amino-propanoic acid
  SITE 3: note = 4-[(2S)-2-amino-2-carboxy-ethyl]benzoic acid
  SITE 5: note = (2S,4R)-4-aminopyrrolidine-2-carboxylic acid
  SITE 6: note = (2S,3S)-2-Amino-3-(3-chloronaphthalen-1-yl)butanoic acid
  SITE 8: note = (R)-piperidine-2-carboxylic acid
  SITE 10: note = 4-[4-[(2S)-2-amino-2-carboxy-ethyl]phenyl]benzoic acid
  SITE 11: note (S)-2-(2-(3-((5-amino-5-carboxypentyl)amino)-3-oxopropoxy)e thoxy)-N,N,N-trimethylethan-1-aminium
  SITE 12: note = (S)-2-Amino-3-(tetrahydro-2H-pyran-4-yl)propanoic acid
  SITE 13: note = (2R,4S)-4-aminopyrrolidine-2-carboxylic acid
  SITE 14: note = (2S,4R)-4-(4-(pyrimidin-5-yl)benzyl) pyrrolidine-2-carboxylic acid
XWFGPXDXGXXXPX

SEQ ID NO: 410 - protein, 14 aa, synthetic construct
  SITE 1: note (2S)-3-[4-(2-acetamidoethoxy)phenyl]-2-amino-propanoic acid
  SITE 3: note = 4-[(2S)-2-amino-2-carboxy-ethyl]benzoic acid
  SITE 5: note = (2S,4R)-4-aminopyrrolidine-2-carboxylic acid
  SITE 6: note = (2S,3S)-2-Amino-3-(3-chloronaphthalen-1-yl)butanoic acid
  SITE 8: note = (R)-piperidine-2-carboxylic acid
  SITE 10: note = 4-[4-[(2S)-2-amino-2-carboxy-ethyl]phenyl]benzoic acid
  SITE 11: note (S)-2-(2-(3-((5-amino-5-carboxypentyl)amino)-3-oxopropoxy)e thoxy)-N,N,N-trimethylethan-1-aminium
  SITE 12: note = (2S)-2-amino-5-ureido-pentanoic acid
  SITE 13: note = (2R,4S)-4-aminopyrrolidine-2-carboxylic acid
  SITE 14: note = (2S,4R)-4-(4-(pyrimidin-5-yl)benzyl) pyrrolidine-2-carboxylic acid
XWFGPXDXGXXXPX

SEQ ID NO: 411 - protein, 14 aa, synthetic construct
  SITE 1: note (2S)-3-[4-(2-acetamidoethoxy)phenyl]-2-amino-propanoic acid
  SITE 3: note = 4-[(2S)-2-amino-2-carboxy-ethyl]benzoic acid
  SITE 5: note = (2S,4R)-4-aminopyrrolidine-2-carboxylic acid
  SITE 6: note = (2S,3S)-2-Amino-3-(3-chloronaphthalen-1-yl)butanoic acid
  SITE 8: note = (R)-piperidine-2-carboxylic acid
  SITE 10: note = 4-[4-[(2S)-2-amino-2-carboxy-ethyl]phenyl]benzoic acid
  SITE 11: note (S)-2-(2-(3-((5-amino-5-carboxypentyl)amino)-3-oxopropoxy)e thoxy)-N,N,N-trimethylethan-1-aminium
  SITE 12: note = N4,N4-dimethyl-L-asparagine
  SITE 13: note = (2R,4S)-4-aminopyrrolidine-2-carboxylic acid
  SITE 14: note = (2S,4R)-4-(4-(pyrimidin-5-yl)benzyl) pyrrolidine-2-carboxylic acid
XWFGPXDXGXXXPX

SEQ ID NO: 412 - protein, 14 aa, synthetic construct
  SITE 1: note (2S)-3-[4-(2-acetamidoethoxy)phenyl]-2-amino-propanoic acid
  SITE 3: note = 4-[(2S)-2-amino-2-carboxy-ethyl]benzoic acid
  SITE 5: note = (2S,4R)-4-aminopyrrolidine-2-carboxylic acid
  SITE 6: note = (2S,3S)-2-Amino-3-(3-chloronaphthalen-1-yl)butanoic acid
  SITE 8: note = (R)-piperidine-2-carboxylic acid
  SITE 10: note = 4-[4-[(2S)-2-amino-2-carboxy-ethyl]phenyl]benzoic acid
  SITE 11: note (S)-2-(2-(3-((5-amino-5-carboxypentyl)amino)-3-oxopropoxy)e thoxy)-N,N,N-trimethylethan-1-aminium
  SITE 12: note = (S)-2-Aminopentanoic acid
  SITE 13: note = (2R,4S)-4-aminopyrrolidine-2-carboxylic acid
  SITE 14: note = (2S,4R)-4-(4-(pyrimidin-5-yl)benzyl) pyrrolidine-2-carboxylic acid
XWFGPXDXGXXXPX

SEQ ID NO: 413 - protein, 14 aa, synthetic construct
  SITE 1: note (2S)-3-[4-(2-acetamidoethoxy)phenyl]-2-amino-propanoic acid
  SITE 3: note = 4-[(2S)-2-amino-2-carboxy-ethyl]benzoic acid
  SITE 5: note = (2S,4R)-4-aminopyrrolidine-2-carboxylic acid
  SITE 6: note = (2S,3S)-2-Amino-3-(3-chloronaphthalen-1-yl)butanoic acid
  SITE 8: note = (R)-piperidine-2-carboxylic acid
  SITE 10: note = 4-[4-[(2S)-2-amino-2-carboxy-ethyl]phenyl]benzoic acid
  SITE 11: note (S)-2-(2-(3-((5-amino-5-carboxypentyl)amino)-3-oxopropoxy)e thoxy)-N,N,N-trimethylethan-1-aminium
  SITE 13: note = (2R,4S)-4-aminopyrrolidine-2-carboxylic acid
  SITE 14: note = (2S,4R)-4-(4-(pyrimidin-5-yl)benzyl) pyrrolidine-2-carboxylic acid
XWFGPXDXGXXAPX

SEQ ID NO: 414 - protein, 14 aa, synthetic construct
  SITE 1: note (2S)-3-[4-(2-acetamidoethoxy)phenyl]-2-amino-propanoic acid
  SITE 3: note = (S)-2-Amino-3-(4-carbamoylphenyl)propanoic acid
  SITE 5: note = (2S,4R)-4-aminopyrrolidine-2-carboxylic acid
  SITE 6: note = (2S,3S)-2-Amino-3-(3-chloronaphthalen-1-yl)butanoic acid
  SITE 8: note = (R)-piperidine-2-carboxylic acid
  SITE 10: note = 4-[4-[(2S)-2-amino-2-carboxy-ethyl]phenyl]benzoic acid
  SITE 11: note (S)-2-(2-(3-((5-amino-5-carboxypentyl)amino)-3-oxopropoxy)e thoxy)-N,N,N-trimethylethan-1-aminium
  SITE 12: note = (S)-2-amino-5-methoxypentanoic acid
  SITE 13: note = (2R,4S)-4-aminopyrrolidine-2-carboxylic acid
  SITE 14: note = (2S,4R)-4-(4-(pyrimidin-5-yl)benzyl) pyrrolidine-2-carboxylic acid
XWFGPXDXGXXXPX

SEQ ID NO: 415 - protein, 14 aa, synthetic construct
  SITE 1: note (2S)-3-[4-(2-acetamidoethoxy)phenyl]-2-amino-propanoic acid
  SITE 3: note = (S)-2-Amino-3-(4-carbamoylphenyl)propanoic acid
  SITE 5: note = (2S,4R)-4-aminopyrrolidine-2-carboxylic acid
  SITE 6: note = (2S,3S)-2-Amino-3-(3-chloronaphthalen-1-yl)butanoic acid
  SITE 8: note = (R)-piperidine-2-carboxylic acid
  SITE 10: note = 4-[4-[(2S)-2-amino-2-carboxy-ethyl]phenyl]benzoic acid
  SITE 11: note (S)-2-(2-(3-((5-amino-5-carboxypentyl)amino)-3-oxopropoxy)e thoxy)-N,N,N-trimethylethan-1-aminium
  SITE 12: note = (S)-2-Amino-3-(tetrahydro-2H-pyran-4-yl)propanoic acid
  SITE 13: note = (2R,4S)-4-aminopyrrolidine-2-carboxylic acid
  SITE 14: note = (2S,4R)-4-(4-(pyrimidin-5-yl)benzyl) pyrrolidine-2-carboxylic acid
XWFGPXDXGXXXPX

SEQ ID NO: 416 - protein, 14 aa, synthetic construct
  SITE 1: note (2S)-3-[4-(2-acetamidoethoxy)phenyl]-2-amino-propanoic acid
  SITE 3: note = (S)-2-Amino-3-(4-carbamoylphenyl)propanoic acid
  SITE 5: note = (2S,4R)-4-aminopyrrolidine-2-carboxylic acid
  SITE 6: note = (2S,3S)-2-Amino-3-(3-chloronaphthalen-1-yl)butanoic acid
  SITE 8: note = (R)-piperidine-2-carboxylic acid
  SITE 10: note = 4-[4-[(2S)-2-amino-2-carboxy-ethyl]phenyl]benzoic acid
  SITE 11: note (S)-2-(2-(3-((5-amino-5-carboxypentyl)amino)-3-oxopropoxy)e thoxy)-N,N,N-trimethylethan-1-aminium
  SITE 12: note = (2S)-2-amino-5-ureido-pentanoic acid
  SITE 13: note = (2R,4S)-4-aminopyrrolidine-2-carboxylic acid
  SITE 14: note = (2S,4R)-4-(4-(pyrimidin-5-yl)benzyl) pyrrolidine-2-carboxylic acid
XWFGPXDXGXXXPX

SEQ ID NO: 417 - protein, 14 aa, synthetic construct
  SITE 1: note (2S)-3-[4-(2-acetamidoethoxy)phenyl]-2-amino-propanoic acid
  SITE 3: note = (S)-2-Amino-3-(4-carbamoylphenyl)propanoic acid
  SITE 5: note = (2S,4R)-4-aminopyrrolidine-2-carboxylic acid
  SITE 6: note = (2S,3S)-2-Amino-3-(3-chloronaphthalen-1-yl)butanoic acid
  SITE 8: note = (R)-piperidine-2-carboxylic acid
  SITE 10: note = 4-[4-[(2S)-2-amino-2-carboxy-ethyl]phenyl]benzoic acid
  SITE 11: note (S)-2-(2-(3-((5-amino-5-carboxypentyl)amino)-3-oxopropoxy)e thoxy)-N,N,N-trimethylethan-1-aminium
  SITE 12: note = N4,N4-dimethyl-L-asparagine
  SITE 13: note = (2R,4S)-4-aminopyrrolidine-2-carboxylic acid
  SITE 14: note = (2S,4R)-4-(4-(pyrimidin-5-yl)benzyl) pyrrolidine-2-carboxylic acid
XWFGPXDXGXXXPX

SEQ ID NO: 418 - protein, 14 aa, synthetic construct
  SITE 1: note (2S)-3-[4-(2-acetamidoethoxy)phenyl]-2-amino-propanoic acid
  SITE 3: note = (S)-2-Amino-3-(4-carbamoylphenyl)propanoic acid
  SITE 5: note = (2S,4R)-4-aminopyrrolidine-2-carboxylic acid
  SITE 6: note = (2S,3S)-2-Amino-3-(3-chloronaphthalen-1-yl)butanoic acid
  SITE 8: note = (R)-piperidine-2-carboxylic acid
  SITE 10: note = 4-[4-[(2S)-2-amino-2-carboxy-ethyl]phenyl]benzoic acid
  SITE 11: note (S)-2-(2-(3-((5-amino-5-carboxypentyl)amino)-3-oxopropoxy)e thoxy)-N,N,N-trimethylethan-1-aminium
  SITE 13: note = (2R,4S)-4-aminopyrrolidine-2-carboxylic acid
  SITE 14: note = (2S,4R)-4-(4-(pyrimidin-5-yl)benzyl) pyrrolidine-2-carboxylic acid
XWFGPXDXGXXAPX

SEQ ID NO: 419 - protein, 14 aa, synthetic construct
  SITE 1: note (2S)-3-[4-(2-acetamidoethoxy)phenyl]-2-amino-propanoic acid
  SITE 3: note = (S)-2-Amino-3-(4-carbamoylphenyl)propanoic acid
  SITE 5: note = (2S,4R)-4-aminopyrrolidine-2-carboxylic acid
  SITE 6: note = (2S,3S)-2-Amino-3-(3-chloronaphthalen-1-yl)butanoic acid
  SITE 8: note = (R)-piperidine-2-carboxylic acid
  SITE 10: note = 4-[4-[(2S)-2-amino-2-carboxy-ethyl]phenyl]benzoic acid
  SITE 11: note (S)-2-(2-(3-((5-amino-5-carboxypentyl)amino)-3-oxopropoxy)e thoxy)-N,N,N-trimethylethan-1-aminium
  SITE 12: note = (S)-2-Aminopentanoic acid
  SITE 13: note = (2R,4S)-4-aminopyrrolidine-2-carboxylic acid
  SITE 14: note = (2S,4R)-4-(4-(pyrimidin-5-yl)benzyl) pyrrolidine-2-carboxylic acid
XWFGPXDXGXXXPX

SEQ ID NO: 420 - protein, 14 aa, synthetic construct
  SITE 1: note (2S)-3-[4-(2-acetamidoethoxy)phenyl]-2-amino-propanoic acid
  SITE 3: note = (S)-2-Amino-3-(4-carbamoylphenyl)propanoic acid
  SITE 5: note = (2S,4R)-4-aminopyrrolidine-2-carboxylic acid
  SITE 6: note = (2S,3S)-2-Amino-3-(3-chloronaphthalen-1-yl)butanoic acid
  SITE 8: note = D-N-methyl-Alanine
  SITE 10: note = 4-[4-[(2S)-2-amino-2-carboxy-ethyl]phenyl]benzoic acid
  SITE 11: note (S)-2-(2-(3-((5-amino-5-carboxypentyl)amino)-3-oxopropoxy)e thoxy)-N,N,N-trimethylethan-1-aminium
  SITE 12: note = (S)-2-Aminopentanoic acid
  SITE 13: note = (2R,4S)-4-aminopyrrolidine-2-carboxylic acid
  SITE 14: note = (2S,4R)-4-(4-(pyrimidin-5-yl)benzyl) pyrrolidine-2-carboxylic acid
XWFGPXDXGXXXPX

SEQ ID NO: 421 - protein, 14 aa, synthetic construct
  SITE 1: note (2S)-3-[4-(2-acetamidoethoxy)phenyl]-2-amino-propanoic acid
  SITE 3: note = (S)-2-Amino-3-(4-carbamoylphenyl)propanoic acid
  SITE 5: note = (2S,4R)-4-aminopyrrolidine-2-carboxylic acid
  SITE 6: note = (2S,3S)-2-Amino-3-(3-chloronaphthalen-1-yl)butanoic acid
  SITE 8: note = (R)-piperidine-2-carboxylic acid
  SITE 10: note = 4-[4-[(2S)-2-amino-2-carboxy-ethyl]phenyl]benzoic acid
  SITE 11: note (S)-21-Amino-21-carboxy-N,N,N-trimethyl-15-oxo-3,6,9,12-tet raoxa-16-azahenicosan-1-aminium
  SITE 13: note = (2R,4S)-4-aminopyrrolidine-2-carboxylic acid
  SITE 14: note = (2S,4R)-4-(4-(pyrimidin-5-yl)benzyl) pyrrolidine-2-carboxylic acid
XWFGPXDXGXXAPX

SEQ ID NO: 422 - protein, 14 aa, synthetic construct
  SITE 1: note (2S)-3-[4-(2-acetamidoethoxy)phenyl]-2-amino-propanoic acid
  SITE 3: note = 4-[(2S)-2-amino-2-carboxy-ethyl]benzoic acid
  SITE 5: note = (2S,4R)-4-aminopyrrolidine-2-carboxylic acid
  SITE 6: note = (2S,3S)-2-Amino-3-(3-chloronaphthalen-1-yl)butanoic acid
  SITE 8: note = D-N-methyl-Alanine
  SITE 10: note = 4-[4-[(2S)-2-amino-2-carboxy-ethyl]phenyl]benzoic acid
  SITE 11: note = (S)-2-Aminopentanoic acid
  SITE 13: note = (2R,4S)-4-aminopyrrolidine-2-carboxylic acid
XWFGPXDXGXXSPP

SEQ ID NO: 423 - protein, 14 aa, synthetic construct
  SITE 1: note (2S)-3-[4-(2-acetamidoethoxy)phenyl]-2-amino-propanoic acid
  SITE 3: note = 4-[(2S)-2-amino-2-carboxy-ethyl]benzoic acid
  SITE 5: note = (2S,4R)-4-aminopyrrolidine-2-carboxylic acid
  SITE 6: note = (2S,3S)-2-Amino-3-(3-chloronaphthalen-1-yl)butanoic acid
  SITE 8: note = (R)-piperidine-2-carboxylic acid
  SITE 10: note = 4-[4-[(2S)-2-amino-2-carboxy-ethyl]phenyl]benzoic acid
  SITE 11: note = (S)-2-Aminopentanoic acid
  SITE 13: note = (2R,4S)-4-aminopyrrolidine-2-carboxylic acid
XWFGPXDXGXXSPP

SEQ ID NO: 424 - protein, 14 aa, synthetic construct
  SITE 1: note (2S)-3-[4-(2-acetamidoethoxy)phenyl]-2-amino-propanoic acid
  SITE 3: note = 4-[(2S)-2-amino-2-carboxy-ethyl]benzoic acid
  SITE 5: note = (2S,4R)-4-aminopyrrolidine-2-carboxylic acid
  SITE 6: note = (2S,3S)-2-Amino-3-(3-chloronaphthalen-1-yl)butanoic acid
  SITE 8: note = D-N-methyl-Alanine
  SITE 10: note = 4-[4-[(2S)-2-amino-2-carboxy-ethyl]phenyl]benzoic acid
  SITE 11: note = (S)-2-Aminopentanoic acid
  SITE 13: note = (2R,4S)-4-aminopyrrolidine-2-carboxylic acid
XWFGPXDXGXXAPP

SEQ ID NO: 425 - protein, 14 aa, synthetic construct
  SITE 1: note (2S)-3-[4-(2-acetamidoethoxy)phenyl]-2-amino-propanoic acid
  SITE 3: note = 4-[(2S)-2-amino-2-carboxy-ethyl]benzoic acid
  SITE 5: note = (2S,4R)-4-aminopyrrolidine-2-carboxylic acid
  SITE 6: note = (2S,3S)-2-Amino-3-(3-chloronaphthalen-1-yl)butanoic acid
  SITE 8: note = (R)-piperidine-2-carboxylic acid
  SITE 10: note = 4-[4-[(2S)-2-amino-2-carboxy-ethyl]phenyl]benzoic acid
  SITE 11: note = (S)-2-Aminopentanoic acid
  SITE 13: note = (2R,4S)-4-aminopyrrolidine-2-carboxylic acid
XWFGPXDXGXXAPP

SEQ ID NO: 426 - protein, 14 aa, synthetic construct
  SITE 1: note (2S)-3-[4-(2-acetamidoethoxy)phenyl]-2-amino-propanoic acid
  SITE 3: note = (S)-2-Amino-3-(4-carbamoylphenyl)propanoic acid
  SITE 5: note = (2S,4R)-4-aminopyrrolidine-2-carboxylic acid
  SITE 6: note = (2S,3S)-2-Amino-3-(3-chloronaphthalen-1-yl)butanoic acid
  SITE 8: note = D-N-methyl-Alanine
  SITE 10: note = 4-[4-[(2S)-2-amino-2-carboxy-ethyl]phenyl]benzoic acid
  SITE 13: note = (2R,4S)-4-hydroxypyrrolidine-2-carboxylic acid
XWFGPXDXGXSAXP

SEQ ID NO: 427 - protein, 14 aa, synthetic construct
  SITE 1: note (2S)-3-[4-(2-acetamidoethoxy)phenyl]-2-amino-propanoic acid
  SITE 3: note = (S)-2-Amino-3-(4-carbamoylphenyl)propanoic acid
  SITE 5: note = (2S,4R)-4-aminopyrrolidine-2-carboxylic acid
  SITE 6: note = (2S,3S)-2-Amino-3-(3-chloronaphthalen-1-yl)butanoic acid
  SITE 8: note = (R)-piperidine-2-carboxylic acid
  SITE 10: note = 4-[4-[(2S)-2-amino-2-carboxy-ethyl]phenyl]benzoic acid
  SITE 13: note = (2R,4S)-4-hydroxypyrrolidine-2-carboxylic acid
XWFGPXDXGXSAXP

SEQ ID NO: 428 - protein, 14 aa, synthetic construct
  SITE 1: note (2S)-3-[4-(2-acetamidoethoxy)phenyl]-2-amino-propanoic acid
  SITE 3: note = 4-[(2S)-2-amino-2-carboxy-ethyl]benzoic acid
  SITE 5: note = (2S,4R)-4-aminopyrrolidine-2-carboxylic acid
  SITE 6: note = (2S,3S)-2-Amino-3-(3-chloronaphthalen-1-yl)butanoic acid
  SITE 8: note = D-N-methyl-Alanine
  SITE 10: note = 4-[4-[(2S)-2-amino-2-carboxy-ethyl]phenyl]benzoic acid
  SITE 13: note = (2R,4S)-4-hydroxypyrrolidine-2-carboxylic acid
XWFGPXDXGXSAXP

SEQ ID NO: 429 - protein, 14 aa, synthetic construct
  SITE 1: note (2S)-3-[4-(2-acetamidoethoxy)phenyl]-2-amino-propanoic acid
  SITE 3: note = 4-[(2S)-2-amino-2-carboxy-ethyl]benzoic acid
  SITE 5: note = (2S,4R)-4-aminopyrrolidine-2-carboxylic acid
  SITE 6: note = (2S,3S)-2-Amino-3-(3-chloronaphthalen-1-yl)butanoic acid
  SITE 8: note = (R)-piperidine-2-carboxylic acid
  SITE 10: note = 4-[4-[(2S)-2-amino-2-carboxy-ethyl]phenyl]benzoic acid
  SITE 13: note = (2R,4S)-4-hydroxypyrrolidine-2-carboxylic acid
XWFGPXDXGXSAXP

SEQ ID NO: 430 - protein, 14 aa, synthetic construct
  SITE 1: note (2S)-3-[4-(2-acetamidoethoxy)phenyl]-2-amino-propanoic acid
  SITE 3: note = (S)-2-Amino-3-(4-carbamoylphenyl)propanoic acid
  SITE 5: note = (2S,4R)-4-aminopyrrolidine-2-carboxylic acid
  SITE 6: note = (2S,3S)-2-Amino-3-(3-chloronaphthalen-1-yl)butanoic acid
  SITE 8: note = D-N-methyl-Alanine
  SITE 10: note = 4-[4-[(2S)-2-amino-2-carboxy-ethyl]phenyl]benzoic acid
  SITE 13: note = (2R,4S)-4-hydroxypyrrolidine-2-carboxylic acid
XWFGPXDXGXAAXP

SEQ ID NO: 431 - protein, 14 aa, synthetic construct
  SITE 1: note (2S)-3-[4-(2-acetamidoethoxy)phenyl]-2-amino-propanoic acid
  SITE 3: note = (S)-2-Amino-3-(4-carbamoylphenyl)propanoic acid
  SITE 5: note = (2S,4R)-4-aminopyrrolidine-2-carboxylic acid
  SITE 6: note = (2S,3S)-2-Amino-3-(3-chloronaphthalen-1-yl)butanoic acid
  SITE 8: note = (R)-piperidine-2-carboxylic acid
  SITE 10: note = 4-[4-[(2S)-2-amino-2-carboxy-ethyl]phenyl]benzoic acid
  SITE 13: note = (2R,4S)-4-hydroxypyrrolidine-2-carboxylic acid
XWFGPXDXGXAAXP

SEQ ID NO: 432 - protein, 14 aa, synthetic construct
  SITE 1: note (2S)-3-[4-(2-acetamidoethoxy)phenyl]-2-amino-propanoic acid
  SITE 3: note = 4-[(2S)-2-amino-2-carboxy-ethyl]benzoic acid
  SITE 5: note = (2S,4R)-4-aminopyrrolidine-2-carboxylic acid
  SITE 6: note = (2S,3S)-2-Amino-3-(3-chloronaphthalen-1-yl)butanoic acid
  SITE 8: note = D-N-methyl-Alanine
  SITE 10: note = 4-[4-[(2S)-2-amino-2-carboxy-ethyl]phenyl]benzoic acid
  SITE 13: note = (2R,4S)-4-hydroxypyrrolidine-2-carboxylic acid
XWFGPXDXGXAAXP

SEQ ID NO: 433 - protein, 14 aa, synthetic construct
  SITE 1: note (2S)-3-[4-(2-acetamidoethoxy)phenyl]-2-amino-propanoic acid
  SITE 3: note = 4-[(2S)-2-amino-2-carboxy-ethyl]benzoic acid
  SITE 5: note = (2S,4R)-4-aminopyrrolidine-2-carboxylic acid
  SITE 6: note = (2S,3S)-2-Amino-3-(3-chloronaphthalen-1-yl)butanoic acid
  SITE 8: note = (R)-piperidine-2-carboxylic acid
  SITE 10: note = 4-[4-[(2S)-2-amino-2-carboxy-ethyl]phenyl]benzoic acid
  SITE 13: note = (2R,4S)-4-hydroxypyrrolidine-2-carboxylic acid
XWFGPXDXGXAAXP

SEQ ID NO: 434 - protein, 14 aa, synthetic construct
  SITE 1: note (2S)-3-[4-(2-acetamidoethoxy)phenyl]-2-amino-propanoic acid
  SITE 3: note = (S)-2-Amino-3-(4-carbamoylphenyl)propanoic acid
  SITE 5: note = (2S,4R)-4-aminopyrrolidine-2-carboxylic acid
  SITE 6: note = (2S,3S)-2-Amino-3-(3-chloronaphthalen-1-yl)butanoic acid
  SITE 8: note = D-N-methyl-Alanine
  SITE 10: note = 4-[4-[(2S)-2-amino-2-carboxy-ethyl]phenyl]benzoic acid
  SITE 13: note = (2R,4S)-4-aminopyrrolidine-2-carboxylic acid
XWFGPXDXGXSAPP

SEQ ID NO: 435 - protein, 14 aa, synthetic construct
  SITE 1: note (2S)-3-[4-(2-acetamidoethoxy)phenyl]-2-amino-propanoic acid
  SITE 3: note = (S)-2-Amino-3-(4-carbamoylphenyl)propanoic acid
  SITE 5: note = (2S,4R)-4-aminopyrrolidine-2-carboxylic acid
  SITE 6: note = (2S,3S)-2-Amino-3-(3-chloronaphthalen-1-yl)butanoic acid
  SITE 8: note = (R)-piperidine-2-carboxylic acid
  SITE 10: note = 4-[4-[(2S)-2-amino-2-carboxy-ethyl]phenyl]benzoic acid
  SITE 13: note = (2R,4S)-4-aminopyrrolidine-2-carboxylic acid
XWFGPXDXGXSAPP

SEQ ID NO: 436 - protein, 14 aa, synthetic construct
  SITE 1: note (2S)-3-[4-(2-acetamidoethoxy)phenyl]-2-amino-propanoic acid
  SITE 3: note = 4-[(2S)-2-amino-2-carboxy-ethyl]benzoic acid
  SITE 5: note = (2S,4R)-4-aminopyrrolidine-2-carboxylic acid
  SITE 6: note = (2S,3S)-2-Amino-3-(3-chloronaphthalen-1-yl)butanoic acid
  SITE 8: note = D-N-methyl-Alanine
  SITE 10: note = 4-[4-[(2S)-2-amino-2-carboxy-ethyl]phenyl]benzoic acid
  SITE 13: note = (2R,4S)-4-aminopyrrolidine-2-carboxylic acid
XWFGPXDXGXSAPP

SEQ ID NO: 437 - protein, 14 aa, synthetic construct
  SITE 1: note (2S)-3-[4-(2-acetamidoethoxy)phenyl]-2-amino-propanoic acid
  SITE 3: note = 4-[(2S)-2-amino-2-carboxy-ethyl]benzoic acid
  SITE 5: note = (2S,4R)-4-aminopyrrolidine-2-carboxylic acid
  SITE 6: note = (2S,3S)-2-Amino-3-(3-chloronaphthalen-1-yl)butanoic acid
  SITE 8: note = (R)-piperidine-2-carboxylic acid
  SITE 10: note = 4-[4-[(2S)-2-amino-2-carboxy-ethyl]phenyl]benzoic acid
  SITE 13: note = (2R,4S)-4-aminopyrrolidine-2-carboxylic acid
XWFGPXDXGXSAPP

SEQ ID NO: 438 - protein, 14 aa, synthetic construct
  SITE 1: note (2S)-3-[4-(2-acetamidoethoxy)phenyl]-2-amino-propanoic acid
  SITE 3: note = (S)-2-Amino-3-(4-carbamoylphenyl)propanoic acid
  SITE 5: note = (2S,4R)-4-aminopyrrolidine-2-carboxylic acid
  SITE 6: note = (2S,3S)-2-Amino-3-(3-chloronaphthalen-1-yl)butanoic acid
  SITE 8: note = D-N-methyl-Alanine
  SITE 10: note = 4-[4-[(2S)-2-amino-2-carboxy-ethyl]phenyl]benzoic acid
  SITE 13: note = (2R,4S)-4-aminopyrrolidine-2-carboxylic acid
XWFGPXDXGXAAPP

SEQ ID NO: 439 - protein, 14 aa, synthetic construct
  SITE 1: note (2S)-3-[4-(2-acetamidoethoxy)phenyl]-2-amino-propanoic acid
  SITE 3: note = (S)-2-Amino-3-(4-carbamoylphenyl)propanoic acid
  SITE 5: note = (2S,4R)-4-aminopyrrolidine-2-carboxylic acid
  SITE 6: note = (2S,3S)-2-Amino-3-(3-chloronaphthalen-1-yl)butanoic acid
  SITE 8: note = (R)-piperidine-2-carboxylic acid
  SITE 10: note = 4-[4-[(2S)-2-amino-2-carboxy-ethyl]phenyl]benzoic acid
  SITE 13: note = (2R,4S)-4-aminopyrrolidine-2-carboxylic acid
XWFGPXDXGXAAPP

SEQ ID NO: 440 - protein, 14 aa, synthetic construct
  SITE 1: note (2S)-3-[4-(2-acetamidoethoxy)phenyl]-2-amino-propanoic acid
  SITE 3: note = 4-[(2S)-2-amino-2-carboxy-ethyl]benzoic acid
  SITE 5: note = (2S,4R)-4-aminopyrrolidine-2-carboxylic acid
  SITE 6: note = (2S,3S)-2-Amino-3-(3-chloronaphthalen-1-yl)butanoic acid
  SITE 8: note = D-N-methyl-Alanine
  SITE 10: note = 4-[4-[(2S)-2-amino-2-carboxy-ethyl]phenyl]benzoic acid
  SITE 13: note = (2R,4S)-4-aminopyrrolidine-2-carboxylic acid
XWFGPXDXGXAAPP

SEQ ID NO: 441 - protein, 14 aa, synthetic construct
  SITE 1: note (2S)-3-[4-(2-acetamidoethoxy)phenyl]-2-amino-propanoic acid
  SITE 3: note = 4-[(2S)-2-amino-2-carboxy-ethyl]benzoic acid
  SITE 5: note = (2S,4R)-4-aminopyrrolidine-2-carboxylic acid
  SITE 6: note = (2S,3S)-2-Amino-3-(3-chloronaphthalen-1-yl)butanoic acid
  SITE 8: note = (R)-piperidine-2-carboxylic acid
  SITE 10: note = 4-[4-[(2S)-2-amino-2-carboxy-ethyl]phenyl]benzoic acid
  SITE 13: note = (2R,4S)-4-aminopyrrolidine-2-carboxylic acid
XWFGPXDXGXAAPP

SEQ ID NO: 442 - protein, 14 aa, synthetic construct
  SITE 1: note (S)-2-Amino-3-(4-(5-methyl-1,2,4-oxadiazol-3-yl)phenyl)prop anoic acid
  SITE 3: note = 4-[(2S)-2-amino-2-carboxy-ethyl]benzoic acid
  SITE 5: note = (2S,4R)-4-aminopyrrolidine-2-carboxylic acid
  SITE 6: note = (2S,3S)-2-Amino-3-(3-chloronaphthalen-1-yl)butanoic acid
  SITE 8: note = (R)-piperidine-2-carboxylic acid
  SITE 10: note = 4-[4-[(2S)-2-amino-2-carboxy-ethyl]phenyl]benzoic acid
  SITE 11: note = (S)-2-amino-5-methoxypentanoic acid
  SITE 13: note = (2R,4S)-4-aminopyrrolidine-2-carboxylic acid
XWFGPXDXGXXAPP

SEQ ID NO: 443 - protein, 14 aa, synthetic construct
  SITE 1: note (S)-2-Amino-3-(4-(5-methyl-1,2,4-oxadiazol-3-yl)phenyl)prop anoic acid
  SITE 3: note = 4-[(2S)-2-amino-2-carboxy-ethyl]benzoic acid
  SITE 5: note = (2S,4R)-4-aminopyrrolidine-2-carboxylic acid
  SITE 6: note = (2S,3S)-2-Amino-3-(3-chloronaphthalen-1-yl)butanoic acid
  SITE 8: note = (R)-piperidine-2-carboxylic acid
  SITE 10: note = 4-[4-[(2S)-2-amino-2-carboxy-ethyl]phenyl]benzoic acid
  SITE 11: note = N4,N4-dimethyl-L-asparagine
  SITE 13: note = (2R,4S)-4-aminopyrrolidine-2-carboxylic acid
XWFGPXDXGXXSPP

SEQ ID NO: 444 - protein, 14 aa, synthetic construct
  SITE 1: note (S)-2-Amino-3-(4-(5-methyl-1,2,4-oxadiazol-3-yl)phenyl)prop anoic acid
  SITE 3: note = 4-[(2S)-2-amino-2-carboxy-ethyl]benzoic acid
  SITE 5: note = (2S,4R)-4-aminopyrrolidine-2-carboxylic acid
  SITE 6: note = (2S,3S)-2-Amino-3-(3-chloronaphthalen-1-yl)butanoic acid
  SITE 8: note = (R)-piperidine-2-carboxylic acid
  SITE 10: note = 4-[4-[(2S)-2-amino-2-carboxy-ethyl]phenyl]benzoic acid
  SITE 11: note = N4,N4-dimethyl-L-asparagine
  SITE 13: note = (2R,4S)-4-hydroxypyrrolidine-2-carboxylic acid
XWFGPXDXGXXSXP

SEQ ID NO: 445 - protein, 14 aa, synthetic construct
  SITE 1: note (S)-2-Amino-3-(4-(5-methyl-1,2,4-oxadiazol-3-yl)phenyl)prop anoic acid
  SITE 3: note = 4-[(2S)-2-amino-2-carboxy-ethyl]benzoic acid
  SITE 5: note = (2S,4R)-4-aminopyrrolidine-2-carboxylic acid
  SITE 6: note = (2S,3S)-2-Amino-3-(3-chloronaphthalen-1-yl)butanoic acid
  SITE 8: note = (R)-piperidine-2-carboxylic acid
  SITE 10: note = 4-[4-[(2S)-2-amino-2-carboxy-ethyl]phenyl]benzoic acid
  SITE 11: note = N4,N4-dimethyl-L-asparagine
  SITE 13: note = (2R,4S)-4-aminopyrrolidine-2-carboxylic acid
XWFGPXDXGXXAPP

SEQ ID NO: 446 - protein, 14 aa, synthetic construct
  SITE 1: note (S)-2-Amino-3-(4-(5-methyl-1,2,4-oxadiazol-3-yl)phenyl)prop anoic acid
  SITE 3: note = 4-[(2S)-2-amino-2-carboxy-ethyl]benzoic acid
  SITE 5: note = (2S,4R)-4-aminopyrrolidine-2-carboxylic acid
  SITE 6: note = (2S,3S)-2-Amino-3-(3-chloronaphthalen-1-yl)butanoic acid
  SITE 8: note = (R)-piperidine-2-carboxylic acid
  SITE 10: note = 4-[4-[(2S)-2-amino-2-carboxy-ethyl]phenyl]benzoic acid
  SITE 11: note = N4,N4-dimethyl-L-asparagine
  SITE 13: note = (2R,4S)-4-hydroxypyrrolidine-2-carboxylic acid
XWFGPXDXGXXAXP

SEQ ID NO: 447 - protein, 14 aa, synthetic construct
  SITE 1: note (S)-2-Amino-3-(4-(5-methyl-1,2,4-oxadiazol-3-yl)phenyl)prop anoic acid
  SITE 3: note = 4-[(2S)-2-amino-2-carboxy-ethyl]benzoic acid
  SITE 5: note = (2S,4R)-4-aminopyrrolidine-2-carboxylic acid
  SITE 6: note = (2S,3S)-2-Amino-3-(3-chloronaphthalen-1-yl)butanoic acid
  SITE 8: note = (R)-piperidine-2-carboxylic acid
  SITE 10: note = 4-[4-[(2S)-2-amino-2-carboxy-ethyl]phenyl]benzoic acid
  SITE 11: note = (S)-2-amino-5-methoxypentanoic acid
  SITE 12: note = (S)-2-amino-5-methoxypentanoic acid
  SITE 13: note = (2R,4S)-4-aminopyrrolidine-2-carboxylic acid
XWFGPXDXGXXXPP

SEQ ID NO: 448 - protein, 14 aa, synthetic construct
  SITE 1: note (S)-2-Amino-3-(4-(5-methyl-1,2,4-oxadiazol-3-yl)phenyl)prop anoic acid
  SITE 3: note = 4-[(2S)-2-amino-2-carboxy-ethyl]benzoic acid
  SITE 5: note = (2S,4R)-4-aminopyrrolidine-2-carboxylic acid
  SITE 6: note = (2S,3S)-2-Amino-3-(3-chloronaphthalen-1-yl)butanoic acid
  SITE 8: note = (R)-piperidine-2-carboxylic acid
  SITE 10: note = 4-[4-[(2S)-2-amino-2-carboxy-ethyl]phenyl]benzoic acid
  SITE 13: note = (2R,4S)-4-aminopyrrolidine-2-carboxylic acid
XWFGPXDXGXASPP

SEQ ID NO: 449 - protein, 14 aa, synthetic construct
  SITE 1: note (S)-2-Amino-3-(4-(5-methyl-1,2,4-oxadiazol-3-yl)phenyl)prop anoic acid
  SITE 3: note = 4-[(2S)-2-amino-2-carboxy-ethyl]benzoic acid
  SITE 5: note = (2S,4R)-4-aminopyrrolidine-2-carboxylic acid
  SITE 6: note = (2S,3S)-2-Amino-3-(3-chloronaphthalen-1-yl)butanoic acid
  SITE 8: note = (R)-piperidine-2-carboxylic acid
  SITE 10: note = 4-[4-[(2S)-2-amino-2-carboxy-ethyl]phenyl]benzoic acid
  SITE 13: note = (2R,4S)-4-hydroxypyrrolidine-2-carboxylic acid
XWFGPXDXGXASXP

SEQ ID NO: 450 - protein, 14 aa, synthetic construct
  SITE 1: note (S)-2-Amino-3-(4-(5-methyl-1,2,4-oxadiazol-3-yl)phenyl)prop anoic acid
  SITE 3: note = 4-[(2S)-2-amino-2-carboxy-ethyl]benzoic acid
  SITE 5: note = (2S,4R)-4-aminopyrrolidine-2-carboxylic acid
  SITE 6: note = (2S,3S)-2-Amino-3-(3-chloronaphthalen-1-yl)butanoic acid
  SITE 8: note = (R)-piperidine-2-carboxylic acid
  SITE 10: note = 4-[4-[(2S)-2-amino-2-carboxy-ethyl]phenyl]benzoic acid
  SITE 13: note = (2R,4S)-4-aminopyrrolidine-2-carboxylic acid
XWFGPXDXGXSAPP

SEQ ID NO: 451 - protein, 14 aa, synthetic construct
  SITE 1: note (S)-2-Amino-3-(4-(5-methyl-1,2,4-oxadiazol-3-yl)phenyl)prop anoic acid
  SITE 3: note = 4-[(2S)-2-amino-2-carboxy-ethyl]benzoic acid
  SITE 5: note = (2S,4R)-4-aminopyrrolidine-2-carboxylic acid
  SITE 6: note = (2S,3S)-2-Amino-3-(3-chloronaphthalen-1-yl)butanoic acid
  SITE 8: note = (R)-piperidine-2-carboxylic acid
  SITE 10: note = 4-[4-[(2S)-2-amino-2-carboxy-ethyl]phenyl]benzoic acid
  SITE 13: note = (2R,4S)-4-hydroxypyrrolidine-2-carboxylic acid
XWFGPXDXGXSAXP

SEQ ID NO: 452 - protein, 14 aa, synthetic construct
  SITE 1: note (S)-2-Amino-3-(4-(5-methyl-1,2,4-oxadiazol-3-yl)phenyl)prop anoic acid
  SITE 3: note = 4-[(2S)-2-amino-2-carboxy-ethyl]benzoic acid
  SITE 5: note = (2S,4R)-4-aminopyrrolidine-2-carboxylic acid
  SITE 6: note = (2S,3S)-2-Amino-3-(3-chloronaphthalen-1-yl)butanoic acid
  SITE 8: note = (R)-piperidine-2-carboxylic acid
  SITE 10: note = 4-[4-[(2S)-2-amino-2-carboxy-ethyl]phenyl]benzoic acid
  SITE 13: note = (2R,4S)-4-aminopyrrolidine-2-carboxylic acid
XWFGPXDXGXAAPP

SEQ ID NO: 453 - protein, 14 aa, synthetic construct
  SITE 1: note (2S)-3-[4-(2-acetamidoethoxy)phenyl]-2-amino-propanoic acid
  SITE 3: note = 4-[(2S)-2-amino-2-carboxy-ethyl]benzoic acid
  SITE 5: note = (2S,4R)-4-aminopyrrolidine-2-carboxylic acid
  SITE 6: note = (2S,3S)-2-Amino-3-(3-chloronaphthalen-1-yl)butanoic acid
  SITE 8: note = (R)-piperidine-2-carboxylic acid
  SITE 10: note = 4-[4-[(2S)-2-amino-2-carboxy-ethyl]phenyl]benzoic acid
  SITE 11: note = (S)-2-amino-5-methoxypentanoic acid
  SITE 13: note = (2R,4S)-4-hydroxypyrrolidine-2-carboxylic acid
XWFGPXDXGXXAXP

SEQ ID NO: 454 - protein, 14 aa, synthetic construct
  SITE 1: note (2S)-3-[4-(2-acetamidoethoxy)phenyl]-2-amino-propanoic acid
  SITE 3: note = 4-[(2S)-2-amino-2-carboxy-ethyl]benzoic acid
  SITE 5: note = (2S,4R)-4-aminopyrrolidine-2-carboxylic acid
  SITE 6: note = (2S,3S)-2-Amino-3-(3-chloronaphthalen-1-yl)butanoic acid
  SITE 8: note = (R)-piperidine-2-carboxylic acid
  SITE 10: note = 4-[4-[(2S)-2-amino-2-carboxy-ethyl]phenyl]benzoic acid
  SITE 11: note = N4,N4-dimethyl-L-asparagine
  SITE 13: note = (2R,4S)-4-aminopyrrolidine-2-carboxylic acid
XWFGPXDXGXXSPP

SEQ ID NO: 455 - protein, 14 aa, synthetic construct
  SITE 1: note (2S)-3-[4-(2-acetamidoethoxy)phenyl]-2-amino-propanoic acid
  SITE 3: note = 4-[(2S)-2-amino-2-carboxy-ethyl]benzoic acid
  SITE 5: note = (2S,4R)-4-aminopyrrolidine-2-carboxylic acid
  SITE 6: note = (2S,3S)-2-Amino-3-(3-chloronaphthalen-1-yl)butanoic acid
  SITE 8: note = (R)-piperidine-2-carboxylic acid
  SITE 10: note = 4-[4-[(2S)-2-amino-2-carboxy-ethyl]phenyl]benzoic acid
  SITE 11: note = N4,N4-dimethyl-L-asparagine
  SITE 13: note = (2R,4S)-4-hydroxypyrrolidine-2-carboxylic acid
XWFGPXDXGXXSXP

SEQ ID NO: 456 - protein, 14 aa, synthetic construct
  SITE 1: note (2S)-3-[4-(2-acetamidoethoxy)phenyl]-2-amino-propanoic acid
  SITE 3: note = 4-[(2S)-2-amino-2-carboxy-ethyl]benzoic acid
  SITE 5: note = (2S,4R)-4-aminopyrrolidine-2-carboxylic acid
  SITE 6: note = (2S,3S)-2-Amino-3-(3-chloronaphthalen-1-yl)butanoic acid
  SITE 8: note = (R)-piperidine-2-carboxylic acid
  SITE 10: note = 4-[4-[(2S)-2-amino-2-carboxy-ethyl]phenyl]benzoic acid
  SITE 11: note = (2S)-2-amino-5-ureido-pentanoic acid
  SITE 13: note = (2R,4S)-4-aminopyrrolidine-2-carboxylic acid
XWFGPXDXGXXSPP

SEQ ID NO: 457 - protein, 14 aa, synthetic construct
  SITE 1: note (2S)-3-[4-(2-acetamidoethoxy)phenyl]-2-amino-propanoic acid
  SITE 3: note = 4-[(2S)-2-amino-2-carboxy-ethyl]benzoic acid
  SITE 5: note = (2S,4R)-4-aminopyrrolidine-2-carboxylic acid
  SITE 6: note = (2S,3S)-2-Amino-3-(3-chloronaphthalen-1-yl)butanoic acid
  SITE 8: note = (R)-piperidine-2-carboxylic acid
  SITE 10: note = 4-[4-[(2S)-2-amino-2-carboxy-ethyl]phenyl]benzoic acid
  SITE 11: note (S)-2-Amino-3-(5-methyl-1,2,4-oxadiazol-3-yl)propanoic acid
  SITE 13: note = (2R,4S)-4-aminopyrrolidine-2-carboxylic acid
XWFGPXDXGXXSPP

SEQ ID NO: 458 - protein, 14 aa, synthetic construct
  SITE 1: note (2S)-3-[4-(2-acetamidoethoxy)phenyl]-2-amino-propanoic acid
  SITE 3: note = 4-[(2S)-2-amino-2-carboxy-ethyl]benzoic acid
  SITE 5: note = (2S,4R)-4-aminopyrrolidine-2-carboxylic acid
  SITE 6: note = (2S,3S)-2-Amino-3-(3-chloronaphthalen-1-yl)butanoic acid
  SITE 8: note = (R)-piperidine-2-carboxylic acid
  SITE 10: note = 4-[4-[(2S)-2-amino-2-carboxy-ethyl]phenyl]benzoic acid
  SITE 11: note (S)-2-Amino-3-(5-(methoxymethyl)-1,2,4-oxadiazol-3-yl)propa noic acid
  SITE 13: note = (2R,4S)-4-aminopyrrolidine-2-carboxylic acid
XWFGPXDXGXXSPP

SEQ ID NO: 459 - protein, 14 aa, synthetic construct
  SITE 1: note (2S)-3-[4-(2-acetamidoethoxy)phenyl]-2-amino-propanoic acid
  SITE 3: note = 4-[(2S)-2-amino-2-carboxy-ethyl]benzoic acid
  SITE 5: note = (2S,4R)-4-aminopyrrolidine-2-carboxylic acid
  SITE 6: note = (2S,3S)-2-Amino-3-(3-chloronaphthalen-1-yl)butanoic acid
  SITE 8: note = (R)-piperidine-2-carboxylic acid
  SITE 10: note = 4-[4-[(2S)-2-amino-2-carboxy-ethyl]phenyl]benzoic acid
  SITE 11: note = (S)-2-amino-5-methoxypentanoic acid
  SITE 13: note = (2R,4S)-4-aminopyrrolidine-2-carboxylic acid
XWFGPXDXGXXSPP

SEQ ID NO: 460 - protein, 14 aa, synthetic construct
  SITE 1: note (2S)-3-[4-(2-acetamidoethoxy)phenyl]-2-amino-propanoic acid
  SITE 3: note = 4-[(2S)-2-amino-2-carboxy-ethyl]benzoic acid
  SITE 5: note = (2S,4R)-4-aminopyrrolidine-2-carboxylic acid
  SITE 6: note = (2S,3S)-2-Amino-3-(3-chloronaphthalen-1-yl)butanoic acid
  SITE 8: note = (R)-piperidine-2-carboxylic acid
  SITE 10: note = 4-[4-[(2S)-2-amino-2-carboxy-ethyl]phenyl]benzoic acid
  SITE 13: note = (2R,4S)-4-aminopyrrolidine-2-carboxylic acid
XWFGPXDXGXASPP

SEQ ID NO: 461 - protein, 14 aa, synthetic construct
  SITE 1: note (2S)-3-[4-(2-acetamidoethoxy)phenyl]-2-amino-propanoic acid
  SITE 3: note = 4-[(2S)-2-amino-2-carboxy-ethyl]benzoic acid
  SITE 5: note = (2S,4R)-4-aminopyrrolidine-2-carboxylic acid
  SITE 6: note = (2S,3S)-2-Amino-3-(3-chloronaphthalen-1-yl)butanoic acid
  SITE 8: note = (R)-piperidine-2-carboxylic acid
  SITE 10: note = 4-[4-[(2S)-2-amino-2-carboxy-ethyl]phenyl]benzoic acid
  SITE 13: note = (2R,4S)-4-hydroxypyrrolidine-2-carboxylic acid
XWFGPXDXGXASXP

SEQ ID NO: 462 - protein, 14 aa, synthetic construct
  SITE 1: note (2S)-3-[4-(2-acetamidoethoxy)phenyl]-2-amino-propanoic acid
  SITE 3: note = 4-[(2S)-2-amino-2-carboxy-ethyl]benzoic acid
  SITE 5: note = (2S,4R)-4-aminopyrrolidine-2-carboxylic acid
  SITE 6: note = (2S,3S)-2-Amino-3-(3-chloronaphthalen-1-yl)butanoic acid
  SITE 8: note = (R)-piperidine-2-carboxylic acid
  SITE 10: note = 4-[4-[(2S)-2-amino-2-carboxy-ethyl]phenyl]benzoic acid
  SITE 11: note = (S)-2-amino-5-methoxypentanoic acid
  SITE 12: note = (S)-2-amino-5-methoxypentanoic acid
  SITE 13: note = (2R,4S)-4-hydroxypyrrolidine-2-carboxylic acid
XWFGPXDXGXXXXP

SEQ ID NO: 463 - protein, 14 aa, synthetic construct
  SITE 1: note (2S)-3-[4-(2-acetamidoethoxy)phenyl]-2-amino-propanoic acid
  SITE 3: note = 4-[(2S)-2-amino-2-carboxy-ethyl]benzoic acid
  SITE 5: note = (2S,4R)-4-aminopyrrolidine-2-carboxylic acid
  SITE 6: note = (2S,3S)-2-Amino-3-(3-chloronaphthalen-1-yl)butanoic acid
  SITE 8: note = (R)-piperidine-2-carboxylic acid
  SITE 10: note = 4-[4-[(2S)-2-amino-2-carboxy-ethyl]phenyl]benzoic acid
  SITE 11: note = (S)-2-amino-5-methoxypentanoic acid
  SITE 12: note = (S)-2-amino-5-methoxypentanoic acid
  SITE 13: note = (2R,4S)-4-aminopyrrolidine-2-carboxylic acid
XWFGPXDXGXXXPP

SEQ ID NO: 464 - protein, 14 aa, synthetic construct
  SITE 1: note (S)-2-Amino-3-(4-(5-methyl-1,2,4-oxadiazol-3-yl)phenyl)prop anoic acid
  SITE 3: note = 4-[(2S)-2-amino-2-carboxy-ethyl]benzoic acid
  SITE 5: note = (2S,4R)-4-aminopyrrolidine-2-carboxylic acid
  SITE 6: note = (2S,3S)-2-Amino-3-(3-chloronaphthalen-1-yl)butanoic acid
  SITE 8: note = (R)-piperidine-2-carboxylic acid
  SITE 10: note = 4-[4-[(2S)-2-amino-2-carboxy-ethyl]phenyl]benzoic acid
  SITE 11: note = (S)-2-amino-5-methoxypentanoic acid
  SITE 13: note = (2R,4S)-4-aminopyrrolidine-2-carboxylic acid
XWFGPXDXGXXSPP

SEQ ID NO: 465 - protein, 14 aa, synthetic construct
  SITE 1: note (S)-2-Amino-3-(4-(5-methyl-1,2,4-oxadiazol-3-yl)phenyl)prop anoic acid
  SITE 3: note = 4-[(2S)-2-amino-2-carboxy-ethyl]benzoic acid
  SITE 5: note = (2S,4R)-4-aminopyrrolidine-2-carboxylic acid
  SITE 6: note = (2S,3S)-2-Amino-3-(3-chloronaphthalen-1-yl)butanoic acid
  SITE 8: note = (R)-piperidine-2-carboxylic acid
  SITE 10: note = 4-[4-[(2S)-2-amino-2-carboxy-ethyl]phenyl]benzoic acid
  SITE 11: note = (S)-2-amino-5-methoxypentanoic acid
  SITE 13: note = (2R,4S)-4-hydroxypyrrolidine-2-carboxylic acid
XWFGPXDXGXXSXP

What is claimed is:

1. A compound of the Formula (I) [chemical structure]
wherein:
R¹ is
(i) R^{1a}—C(O)N(H)—CH₂CH₂—O—, wherein
R^{1a} is
(a) C₁-C₃ alkyl or
(b) (CH₃)₃N—CH₂CH₂-M-, wherein:
M is —CH₂—, —CH₂CH₂—, —CH₂CH₂CH₂—, —O—CH₂CH₂—, or —O—CH₂CH₂—O—CH₂CH₂—;
(ii) (CH₃)₃N—CH₂CH₂—O—;
(iii) C¹, wherein C¹ is:
(a) phenyl or a 5- to 6-membered monocyclic heteroaryl, wherein said 5- to 6-membered monocyclic heteroaryl contains 1 to 3 heteroatoms independently selected from the group consisting of N, O, and S;
(b) a 5- to 6-membered heterocycloalkyl, wherein said 5- to 6-membered heterocycloalkyl is saturated and contains 1 or 2 heteroatoms selected from the group consisting of N, O, and S;
wherein C¹ is unsubstituted or substituted by 1 to 3 R^{C1} substituents independently selected from the group consisting of halo, C₁-C₃ alkyl, C₁-C₃ fluoroalkyl, carboxy, C₁-C₃ alkoxy, C₂-C₃ acyl, and C₁-C₃ alkoxymethyl;
(iii) (CH₃)₃N—CH₂CH₂—O—; or
(iv) a group [chemical structure]
R^{A} is:
(i) —CO₂H;
(ii) —CO₂NH₂;
(iii) —S(O)₂NH₂; or
(iv) a 5-membered heteroaryl containing 2 or 3 heteroatoms independently selected from the group consisting of N, O, and S;
wherein the 5-membered heteroaryl is unsubstituted or substituted by 1 to 2 substituents independently selected from the group consisting of halo, C₁-C₃ alkyl, C₁-C₃ alkoxy, oxo, and C₁-C₃ alkoxymethyl;
R^{B} is amino, hydroxy, or fluoro;
R² is
(i) naphthyl; or
(ii) a 9- to 10-membered bicyclic heteroaryl, wherein said 9- to 10-membered bicyclic heteroaryl contains 1 to 2 heteroatoms independently selected from the group consisting of N, O, and S;
wherein R² is unsubstituted or substituted by 1 to 2 R^{2a} substituents independently selected from the group consisting of halo, C₁-C₃ alkyl and C₁-C₃ alkoxy;
R³ is —(CH₂)ₘCO₂H, —(CH₂)ₘCO₂NH₂, —(CH₂)ₘCO₂N(CH₃)₂, —(CH₂)ₘCH₂N(H)C(O)NH₂, or —(CH₂)ₘ—C³;
wherein C³ is a 5-membered heteroaryl containing 2 to 4 heteroatoms selected from the group consisting of N, O, and S;
wherein C³ is unsubstituted or substituted by 1 to 2 substituent selected from the group consisting of halo and C₁-C₃ alkyl;
R⁴ is C₁-C₃ alkyl;
R⁵ is H, C₁-C₃ alkyl, or —CH₂CO₂H;
or alternatively R⁴ and R⁵ together with the atoms to which they are attached form a pyrrolidinyl, piperidinyl or azepinyl ring;
X¹, X², and X³ are independently C(H) or N;
R^{D} is:
(i) ring CD, wherein ring CD is:
(a) phenyl; or
(b) cyclohexyl;
wherein ring CD is substituted by one A¹; wherein A¹ is —CO₂H, —CONH₂, or —N(H)SO₂CH₃;
(ii) hydroxy;
(iii) —CO₂NH₂; or
(iv) —OCH₂CH₂C(O)N(H)C(O)CH₃;
A² is H, halo or C₁-C₃ alkyl;
R⁶ is —H, —NH₂, —C(O)N(CH₃)₂; —(CH₂)ₙNH₂; —(CH₂)ₙN(H)CH₃; —(CH₂)ₙN(CH₃)₃; —OH; —(CH₂)ₙOH; —OCH₃; —(CH₂)ₙOCH₃; —(CH₂)ₙCH₃; —(CH₂)ₙN(H)C(O)NH₂; —(CH₂)ₙCH₂C(O)OH; —(CH₂)ₙN(H)C(O)CH₂CH₂O(CH₂CH₂—O)q-CH₂CH₂N(CH₃)₃; or —C⁶;
C⁶ is
(i) a 5- to 6-membered monocyclic aryl or heteroaryl, wherein said 5- to 6-membered monocyclic heteroaryl contains 1 to 3 heteroatoms independently selected from the group consisting of N, O, and S;
(ii) a 9- to 10-membered bicyclic aryl or heteroaryl, wherein said 9- to 10-membered bicyclic heteroaryl contains 1 to 4 heteroatoms independently selected from the group consisting of N, O, and S; and
(iii) a 3- to 8-membered mono- or bicyclic cycloalkyl;
wherein C⁶ is unsubstituted or substituted by 1 to 3 R^{C6} substituents independently selected from the group consisting of halo, amino, hydroxy, carboxy, C₁-C₃ alkyl, C₁-C₃ fluoroalkyl, C₁-C₃ alkoxy, and C₁-C₃ alkoxymethyl;
R⁷ is H, C₁-C₄ alkyl, —(CH₂)ᵤOH, —(CH₂)ᵤC(O)N(CH₃)₂, —(CH₂)ᵤN(CH₃)₃, —(CH₂)ᵤOCH₃, —(CH₂)ᵤC(O)NC(O)NH₂, —(CH₂)ᵤN(H)C(O)CH₂CH₂O(CH₂CH₂—O)ᵥ—CH₂CH₂N(CH₃)₃, or —CH₂—C⁷;
C⁷ is:
(i) a 5-membered heteroaryl containing 2 to 4 heteroatoms selected from the group consisting of N, O, and S; or
(ii) a 5- to 6-membered heterocycloalkyl, wherein said 5- to 6-membered heterocycloalkyl is saturated and contains 1 O atom;
wherein C⁷ is unsubstituted or substituted by 1 to 2 substituents selected from the group consisting of halo, C₁-C₃ alkyl, C₁-C₃ alkoxy, and C₁-C₃ alkoxymethyl;
R⁸ is —H, —F, —OH, —NH₂, —N(CH₃)₃, (CH₃)₃N—(CH₂)ᵣ—C(O)—, or (CH₃)₃N—CH₂CH₂—O—(CH₂CH₂—O)ₛ—CH₂CH₂—C(O)—
R⁹ is —C⁹ or —CH₂—C⁹;
C⁹ is phenyl or a 5- to 6-membered monocyclic heteroaryl, wherein said 5- to 6-membered monocyclic heteroaryl contains 1 to 2 heteroatoms independently selected from the group consisting of N, O, and S;
wherein C⁹ is unsubstituted or substituted by 1 to 3 R^{C9} substituents independently selected from the group consisting of halo, amino, hydroxy, C₁-C₃ alkyl, C₁-C₃ fluoroalkyl, and C₁-C₃ alkoxy;
wherein C⁹ is optionally substituted by 1 ring R^{C9C}, the ring R^{C9C} is:
(a) phenyl; or
(b) a 5- to 6-membered monocyclic heteroaryl containing 1 to 2 heteroatoms independently selected from the group consisting of N, O, and S;
subscript m is 1 or 2;
subscript n is 1, 2, or 3; and
subscript q is 1, 2, or 3;
subscript r is 3, 4, 5, or 6;
subscript s is 1 or 2;
subscript t is 0 or 1;
subscript u is 0, 1, 2, 3, or 4;
subscript v is 1, 2, or 3; and
subscript w is 0 or 1; or
a pharmaceutically acceptable salt thereof.

2. The compound of claim 1 or a pharmaceutically acceptable salt thereof, wherein:
C¹ is phenyl;
R² is indolyl or naphthyl;
C⁶ is phenyl, indolyl, pyridyl, pyridazinyl, or bicyclo[1.1.1]pentanyl; and
C⁹ is phenyl or pyrimidinyl.

3. The compound of claim 1 or a pharmaceutically acceptable salt thereof, wherein R¹ is CH₃—C(O)N(H)—CH₂CH₂—O— or 4-fluorophenyl.

4. The compound of claim 1 or a pharmaceutically acceptable salt thereof, wherein R² is unsubstituted or substituted naphthyl or indolyl.

5. The compound of claim 1 or a pharmaceutically acceptable salt thereof, wherein R³ is —(CH₂)ₘCO₂H.

6. The compound of claim 5 or a pharmaceutically acceptable salt thereof, wherein subscript m is 1.

7. The compound of claim 1 or a pharmaceutically acceptable salt thereof, wherein R⁴ and R⁵ are methyl.

8. The compound of claim 1 or a pharmaceutically acceptable salt thereof, wherein:
X¹ and X² are C(H) and
A¹ is carboxy.

9. The compound of claim 1 or a pharmaceutically acceptable salt thereof, wherein R⁶ is:
(i) a substituted or unsubstituted 5- to 6-membered monocyclic aryl or heteroaryl, wherein said 5- to 6-membered monocyclic heteroaryl contains 1 to 2 N atoms; or
(ii) a substituted or unsubstituted 9- to 10-membered bicyclic heteroaryl, wherein said bicyclic heteroaryl contains 1 to 2 N atoms.

10. The compound of claim 9 or a pharmaceutically acceptable salt thereof, wherein R⁶ is indolyl.

11. The compound of claim 1 or a pharmaceutically acceptable salt thereof, wherein R⁷ is H.

12. The compound of claim 1 or a pharmaceutically acceptable salt thereof, wherein R⁸ is H or —NH₂.

13. The compound of claim 1 or a pharmaceutically acceptable salt thereof, wherein R⁹ is substituted on position 4 of the illustrated pyrrolidinyl ring.

14. The compound of claim 13 or a pharmaceutically acceptable salt thereof, wherein C⁹ is substituted or unsubstituted phenyl or pyrimidinyl.

15. The compound of claim 1 or a pharmaceutically acceptable salt thereof, wherein R⁹ is —CH₂-(4-fluorophenyl) or pyrimidin-5-yl.

16. The compound of claim 1 or a pharmaceutically acceptable salt thereof, wherein:
R¹ is CH₃—C(O)N(H)—CH₂CH₂—O— or 4-fluorophenyl;
R² is unsubstituted or substituted naphthyl or indolyl;
R³ is —(CH₂)ₘCO₂H;
R⁴ and R⁵ are methyl;
X¹ and X² are C(H);
A¹ is carboxy;
A² is H;
R⁶ is:
(i) a substituted or unsubstituted 5- to 6-membered monocyclic aryl or heteroaryl, wherein said 5- to 6-membered monocyclic heteroaryl contains 1 to 2 N atoms; or
(ii) a substituted or unsubstituted 9- to 10-membered bicyclic heteroaryl, wherein said 9- to 10-membered bicyclic heteroaryl contains 1 to 2 N atoms;
R⁷ is H;
R⁸ is H or —NH₂; and
R⁹ is substituted on position 4 of the illustrated pyrrolidinyl ring.

17. The compound of claim 16 or a pharmaceutically acceptable salt thereof, wherein:
R⁶ is indolyl;
R⁹ is —CH₂-(4-fluorophenyl) or pyrimidin-5-yl, substituted on the 4-position of the illustrated pyrrolidinyl ring; and
subscript m is 1.

18. The compound of claim 1 or the pharmaceutically acceptable salt thereof, wherein the compound of Formula (I) has Formula (IA) [chemical structure]
wherein:
R¹ is:
(i) R^{1a}—C(O)N(H)—CH₂CH₂—O—, wherein R^{1a} is:
(a) methyl; or
(b) (CH₃)₃N—CH₂CH₂—O—CH₂CH₂—;
(ii) (CH₃)₃N—CH₂CH₂—O—; or
(iii) 4-carboxyphenyl;
R² is a group [chemical structure]
R^{2a} is halo or methyl;
subscript x is 0 or 1;
R³ is —CH₂CO₂H or —CH₂-tetrazolyl;
R⁴ and R⁵ are methyl;
or alternatively R⁴ and R⁵ together with the atoms to which they are attached form a piperidinyl ring;
R^{D} is 4-carboxyphenyl or hydroxy;
R⁶ is a group selected from: [chemical structure]
R⁷ is H or methyl;
R⁸ is —H, —NH₂, or —OH;
C⁹ is a group selected from

[chemical structure]

19. The compound of claim 1 selected from the group consisting of SEQ ID NOS: 1-465, or a pharmaceutically acceptable salt thereof.

20. The compound of claim 1 selected from the group consisting of (SEQ ID NOs: 1, 2, 78, 80, 82, 92, 94, 95, 98, 99, 100, 101, 102, 215, 216, 217, and 218, respectively): [chemical structure] [chemical structure] [chemical structure] [chemical structure] [chemical structure] [chemical structure] [chemical structure] [chemical structure] [chemical structure]
or a pharmaceutically acceptable salt thereof.

21. A pharmaceutical composition comprising the compound of claim 1 or a pharmaceutically acceptable salt thereof, and a pharmaceutically acceptable carrier.

22. A method of treating atherosclerosis, comprising administering a therapeutically effective amount of the compound of claim 1 or a pharmaceutically acceptable salt thereof to a subject in need thereof.

23. A method of treating vascular inflammation, comprising administering a therapeutically effective amount of the compound of claim 1 or a pharmaceutically acceptable salt thereof to a subject in need thereof.

24. A method of treating an inflammatory disorder, comprising administering a therapeutically effective amount of the compound of claim 1 or a pharmaceutically acceptable salt thereof to a subject in need thereof.
